(19) United States
(12) Patent Application Publication
(10) Pub. No.: US 2013/0156769 A1
(43) Pub. Date: Jun. 20, 2013

(54) BINDING MOLECULES FOR BCMA AND CD3

(71) Applicants: Amgen Research (Munich) GmbH, Munich (DE); Boehringer Ingelheim International GmbH, Ingelheim am Rhein (DE)

(72) Inventors: Peter Kufer, Munich (DE); Tobias Raum, Munich (DE); Patrick Hoffmann, Munich (DE); Roman Kischel, Munich (DE); Ralf Lutterbuese, Munich (DE); Doris Rau, Munich (DE); Paul Adam, Ingelheim am Rhein (DE); Eric Borges, Ingelheim am Rhein (DE); Barbara Hebeis, Ingelheim am Rhein (DE); Susanne Hipp, Ingelheim am Rhein (DE)

(73) Assignees: BOEHRINGER INGELHEIM INTERNATIONAL GMBH, Ingelheim am Rhein (DE); AMGEN RESEARCH (MUNICH) GMBH, Munich (DE)

(21) Appl. No.: 13/678,247

(22) Filed: Nov. 15, 2012

Related U.S. Application Data
(60) Provisional application No. 61/651,486, filed on May 24, 2012.
(60) Provisional application No. 61/651,474, filed on May 24, 2012.
(60) Provisional application No. 61/560,144, filed on Nov. 15, 2011.
(60) Provisional application No. 61/560,149, filed on Nov. 15, 2011.
(60) Provisional application No. 61/560,162, filed on Nov. 15, 2011.
(60) Provisional application No. 61/560,178, filed on Nov. 15, 2011.
(60) Provisional application No. 61/560,183, filed on Nov. 15, 2011.

(51) Int. Cl. C07K 16/46

(52) U.S. Cl. CPC C07K 16/468
USPC 424/136.1; 530/387.3; 536/23.4; 435/320.1; 435/69.6; 435/328

(57) ABSTRACT

The present invention relates to a binding molecule which is at least bispecific comprising a first and a second binding domain, wherein the first binding domain is capable of binding to epitope cluster 3 of BCMA, and the second binding domain is capable of binding to the T cell CD3 receptor complex. Moreover, the invention provides a nucleic acid sequence encoding the binding molecule, a vector comprising said nucleic acid sequence and a host cell transformed or transfected with said vector. Furthermore, the invention provides a process for the production of the binding molecule of the invention, a medical use of said binding molecule and a kit comprising said binding molecule.

[0001] This application claims the benefit of U.S. Provisional Patent Application Ser. Nos. 61/651,486 filed May 24, 2012, entitled BINDING MOLECULES FOR BCMA AND CD3 (E3); U.S. Provisional Patent Application Ser. No. 61/651,474 filed May 24, 2012, entitled BINDING MOLECULES FOR BCMA AND CD3 (E3-E4); U.S. Provisional Patent Application Ser. No. 61/560,144 filed Nov. 15, 2011, entitled BINDING MOLECULES FOR BCMA AND CD3 (E3); U.S. Provisional Patent Application Ser. No. 61/560,149 filed Nov. 15, 2011, entitled BINDING MOLECULES FOR BCMA AND CD3 (E1-E4); U.S. Provisional Patent Application Ser. No. 61/560,162 filed Nov. 15, 2011, entitled BINDING MOLECULES FOR BCMA AND CD3 (E3-E4); U.S. Provisional Patent Application Ser. No. 61/560,178 filed Nov. 15, 2011, entitled BINDING MOLECULES FOR BCMA AND CD3 (CROSS); and U.S. Provisional Patent Application Ser. No. 61/560,183 filed Nov. 15, 2011, entitled BINDING MOLECULES FOR BCMA AND CD3 (E1-E7); the disclosures of which are incorporated herein by reference.

[0002] The present invention relates to a binding molecule which is at least bispecific comprising a first and a second binding domain, wherein the first binding domain is capable of binding to epitope cluster 3 of BCMA, and the second binding domain is capable of binding to the T cell CD3 receptor complex. Moreover, the invention provides a nucleic acid sequence encoding the binding molecule, a vector comprising said nucleic acid sequence and a host cell transformed or transfected with said vector. Furthermore, the invention provides a process for the production of the binding molecule of the invention, a medical use of said binding molecule and a kit comprising said binding molecule.

[0003] BCMA (B-cell maturation antigen, TNFRSF17, CD269) is a transmembrane protein belonging to the TNF receptor super family. BCMA is originally reported as an integral membrane protein in the Golgi apparatus of human mature B lymphocytes, i.e., as an intracellular protein (Gras et al., (1995) International Immunol 7(7):1093-1105) showing that BCMA seems to have an important role during B-cell development and homeostasis. The finding of Gras et al. might be associated with the fact that the BCMA protein that was described in Gras et al. is, because of a chromosomal translocation, a fusion protein between BCMA and IL-2. Meanwhile BCMA is, however, established to be a B-cell marker that is essential for B-cell development and homeostasis (Schliemann et al., (2001) Science 293 (5537):2111-2114) due to its presumably essential interaction with its ligands BAFF (B cell activating factor), also designated as TALL-1 or TNFSF13B, and APRIL (A proliferation-inducing ligand).

[0004] BCMA expression is restricted to the B-cell lineage and mainly present on plasma cells and plasmablasts and to some extent on memory B-cells, but virtually absent on peripheral and naive B-cells. BCMA is also expressed on multiple myeloma (MM) cells. Together with its family members transmembrane activator and cyclophylin ligand interactor (TACI) and B cell activation factor of TNF family receptor (BAFF-R), BCMA regulates different aspects of humoral immunity, B-cell development and homeostasis. Expression of BCMA appears rather late in B-cell differentiation and contributes to the long term survival of plasmablasts and plasma cells in the bone marrow. Targeted deletion of the BCMA gene in mice does not affect the generation of mature B-cells, the quality and magnitude of humoral immune responses, formation of germinal center and the generation of short-lived plasma cells. However, such mice have significantly reduced numbers of long-lived plasma cells in the bone marrow, indicating the importance of BCMA for their survival (O'Connor et al., 2004).

[0005] In line with this finding, BCMA also supports growth and survival of multiple myeloma(MM) cells. Novak et al found that MM cell lines and freshly isolated MM cells express BCMA and TACI protein on their cell surfaces and have variable expression of BAFF-R protein on their cell surface (Novak et al., (2004) Blood 103(2):689-694).

[0006] Multiple myeloma (MM) is the second most common hematological malignancy and constitutes 2% of all cancer deaths. MM is a heterogenous disease and caused by mostly by chromosome translocations inter alia t(11;14),t(4;14),t(8;14),del(13),del(17) (Drach et al., (1998) Blood 92(3):802-809; Gertz et al., (2005) Blood 106(8):2837-2840; Facon et al., (2001) Blood 97(6):1566-1571). MM-affected patients may experience a variety of disease-related symptoms due to, bone marrow infiltration, bone destruction, renal failure, immunodeficiency, and the psychosocial burden of a cancer diagnosis. As of 2006, the 5-year relative survival rate for MM was approximately 34% highlighting that MM is a difficult-to-treat disease where there are currently no curative options.

[0007] Exciting new therapies such as chemotherapy and stem cell transplantation approaches are becoming available and have improved survival rates but often bring unwanted side effects, and thus MM remains still incurable (Lee et al., (2004) J Natl Compr Canc Netw 8 (4): 379-383). To date, the two most frequently used treatment options for patients with multiple myeloma are combinations of steroids, thalidomide, lenalidomide, bortezomib or various cytotoxic agents, and for younger patients high dose chemotherapy concepts with autologous stem cell transplantation. Most transplants are of the autologous type, i.e. using the patient's own cells. Such transplants, although not curative, have been shown to prolong life in selected patients. They can be performed as initial therapy in newly diagnosed patients or at the time of relapse. Sometimes, in selected patients, more than one transplant may be recommended to adequately control the disease.

[0008] Chemotherapeutic agents used for treating the disease are Cyclophosphamid, Doxorubicin, Vincristin and Melphalan, combination therapies with immunomodulating agents such as thalidomide (Thalomid®), lenalidomide (Revlimid®), bortezomib (Velcade®) and corticosteroids (e.g. Dexamethasone) have emerged as important options for the treatment of myeloma, both in newly diagnosed patients and in patients with advanced disease in whom chemotherapy or transplantation have failed.

[0009] The currently used therapies are usually not curative. Stem cell transplantation may not be an option for many patients because of advanced age, presence of other serious illness, or other physical limitations. Chemotherapy only partially controls multiple myeloma, it rarely leads to complete remission. Thus, there is an urgent need for new, innovative treatments.

[0010] Bellucci et al. (Blood, 2005; 105(10) identified BCMA-specific antibodies in multiple myeloma patients after they had received donor lymphocyte infusions (DLI). Serum of these patients was capable of mediating BCMA-specific cell lysis by ADCC and CDC and was solely detected in patients with anti-tumor responses (4/9), but not in non-responding patients (0/6). The authors speculate that induction of BCMA-specific antibodies contributes to elimination of myeloma cells and long-term remission of patients.

[0011] Ryan et al. (Mol. Cancer. Ther. 2007; 6(11) reported the generation of an antagonistic BCMA-specific antibody that prevents NF-κB activation which is associated with a potent pro-survival signaling pathway in normal and malignant B-cells. In addition, the antibody conferred potent antibody-dependent cell-mediated cytotoxicity (ADCC) to multiple myeloma cell lines in vitro which was significantly enhanced by Fc-engineering.

[0012] Other approaches in fighting blood-borne tumors or autoimmune disorders focus on the interaction between BAFF and APRIL, i.e., ligands of the TNF ligand super family, and their receptors TACI, BAFF-R and BCMA which are activated by BAFF and/or APRIL. For example, by fusing the Fc-domain of human immunoglobulin to TACI, Zymogenetics, Inc. has generated Atacicept (TACI-Ig) to neutralize both these ligands and prevent receptor activation. Atacicept is currently in clinical trials for the treatment of Systemic Lupus Erythematosus (SLE, phase III), multiple sclerosis (MS, phase II) and rheumatoid arthritis (RA, phase II), as well as in phase I clinical trials for the treatment of the B-cell malignancies chronic lymphocytic leukaemia (CLL), non-Hodgkins lymphoma (NHL) and MM. In preclinical studies atacicept reduces growth and survival of primary MM cells and MM cell lines in vitro (Moreaux et al, Blood, 2004, 103) and in vivo (Yaccoby et al, Leukemia, 2008, 22, 406-13), demonstrating the relevance of TACI ligands for MM cells. Since most MM cells and derived cell lines express BCMA and TACI, both receptors might contribute to ligand-mediated growth and survival. These data suggest that antagonizing both BCMA and TACI might be beneficial in the treatment of plasma cell disorders. In addition, BCMA-specific antibodies that cross react with TACI have been described (WO 02/066516).

[0013] Human Genome Sciences and GlaxoSmithKline have developed an antibody targeting BAFF which is called Belimumab. Belimumab blocks the binding of soluble BAFF to its receptors BAFF-R, BCMA and TACI on B cells. Belimumab does not bind B cells directly, but by binding BAFF, belimumab inhibits the survival of B cells, including autoreactive B cells, and reduces the differentiation of B cells into immunoglobulin-producing plasma cells.

[0014] Nevertheless, despite the fact that BCMA; BAFF-R and TACI, i.e., B cell receptors belonging to the TNF receptor super family, and their ligands BAFF and APRIL are subject to therapies in fighting against cancer and/or autoimmune disorders, there is still a need for having available further options for the treatment of such medical conditions.

[0015] Accordingly, there is provided herewith means and methods for the solution of this problem in the form of a binding molecule which is at least bispecific with one binding domain to cytotoxic cells, i.e., cytotoxic T cells, and with a second binding domain to BCMA.

[0016] Thus, in a first aspect the present invention provides a binding molecule which is at least bispecific comprising a first and a second binding domain, wherein
[0017] (a) the first binding domain is capable of binding to epitope cluster 3 of BCMA(CQLRCSSNTPPLTCQRYC) (SEQ ID NO:1016); and
[0018] (b) the second binding domain is capable of binding to the T cell CD3 receptor complex; and
   wherein epitope cluster 3 of BCMA corresponds to amino acid residues 24 to 41 of the sequence as depicted in SEQ ID NO: 1002.

[0019] It must be noted that as used herein, the singular forms “a”, “an”, and “the”, include plural references unless the context clearly indicates otherwise. Thus, for example, reference to “a reagent” includes one or more of such different reagents and reference to “the method” includes reference to equivalent steps and methods known to those of ordinary skill in the art that could be modified or substituted for the methods described herein.

[0020] Unless otherwise indicated, the term “at least” preceding a series of elements is to be understood to refer to every element in the series. Those skilled in the art will recognize, or be able to ascertain using no more than routine experimentation, many equivalents to the specific embodiments of the invention described herein. Such equivalents are intended to be encompassed by the present invention.

[0021] The term “and/or” wherever used herein includes the meaning of “and”, “or” and “all or any other combination of the elements connected by said term”.

[0022] The term “about” or “approximately” as used herein means within ±20%, preferably within ±15%, more preferably within ±10%, and most preferably within ±5% of a given value or range.

[0023] Throughout this specification and the claims which follow, unless the context requires otherwise, the word “comprise”, and variations such as “comprises” and “comprising”, will be understood to imply the inclusion of a stated integer or step or group of integers or steps but not the exclusion of any other integer or step or group of integer or step. When used herein the term “comprising” can be substituted with the term “containing” or “including” or sometimes when used herein with the term “having”.

[0024] When used herein “consisting of” excludes any element, step, or ingredient not specified in the claim element. When used herein, “consisting essentially of” does not exclude materials or steps that do not materially affect the basic and novel characteristics of the claim.

[0025] In each instance herein any of the terms “comprising”, “consisting essentially of” and “consisting of” may be replaced with either of the other two terms.

[0026] Epitope cluster 3 is comprised by the extracellular domain of BCMA. The “BCMA extracellular domain” or “BCMA ECD” refers to a form of BCMA which is essentially free of transmembrane and cytoplasmic domains of BCMA. It will be understood by the skilled artisan that the transmembrane domain identified for the BCMA polypeptide of the present invention is identified pursuant to criteria routinely employed in the art for identifying that type of hydrophobic domain. The exact boundaries of a transmembrane domain may vary but most likely by no more than about 5 amino acids at either end of the domain specifically mentioned herein. A preferred BCMA ECD is shown in SEQ ID NO: 1007.

[0027] The T cell CD3 receptor complex is a protein complex and is composed of four distinct chains. In mammals, the complex contains a CD3γ chain, a CD3δ chain, and two CD3ε (epsilon) chains. These chains associate with a molecule known as the T cell receptor (TCR) and the ζ chain to generate an activation signal in T lymphocytes.

[0028] The redirected lysis of target cells via the recruitment of T cells by bispecific molecules involves cytolytic synapse formation and delivery of perforin and granzymes. The engaged T cells are capable of serial target cell lysis, and are not affected by immune escape mechanisms interfering with peptide antigen processing and presentation, or clonal T cell differentiation; see, for example, WO 2007/042261.

[0029] The term “binding molecule” in the sense of the present disclosure indicates any molecule capable of (specifically) binding to, interacting with or recognizing the target molecules BCMA and CD3. According to the present invention, binding molecules are preferablypolypeptides. Such polypeptides may include proteinaceous parts and non-proteinaceous parts (e.g. chemical linkers or chemical cross-linking agents such as glutaraldehyde).

[0030] A binding molecule, so to say, provides the scaffold for said one or more binding domains so that said binding domains can bind/interact with the target molecules BCMA and CD3. For example, such a scaffold could be provided by protein A, in particular, the Z-domain thereof (affibodies), ImmE7 (immunity proteins), BPTI/APPI (Kunitz domains), Ras-binding protein AF-6 (PDZ-domains), charybdotoxin (Scorpion toxin), CTLA-4, Min-23 (knottins), lipocalins (anticalins), neokarzinostatin, a fibronectin domain, an ankyrin consensus repeat domain or thioredoxin (Skerra, Curr. Opin. Biotechnol. 18, 295-304 (2005); Hosse et al., Protein Sci. 15, 14-27 (2006); Nicaise et al., Protein Sci. 13, 1882-1891 (2004); Nygren and Uhlen, Curr. Opin. Struc. Biol. 7, 463-469 (1997)). A preferred binding molecule is an antibody.

[0031] It is envisaged that the binding molecule is produced by (or obtainable by) phage-display or library screening methods rather than by grafting CDR sequences from a pre-existing (monoclonal) antibody into a scaffold, for example, a scaffold as disclosed herein.

[0032] The term “bispecific” as used herein refers to a binding molecule which comprises at least a first and a second binding domain, wherein the first binding domain is capable of binding to one antigen or target, and the second binding domain is capable of binding to another antigen or target. The “binding molecule” of the invention also comprises multispecific binding molecules such as e.g. trispecific binding molecules, the latter ones including three binding domains.

[0033] It is also envisaged that the binding molecule of the invention has, in addition to its function to bind to the target molecules BCMA and CD3, a further function. In this format, the binding molecule is a tri- or multifunctional binding molecule by targeting plasma cells through binding to BCMA, mediating cytotoxic T cell activity through CD3 binding and providing a further function such as a fully functional Fc constant domain mediating antibody-dependent cellular cytotoxicity through recruitment of effector cells like NK cells, a label (fluorescent etc.), a therapeutic agent such as, e.g. a toxin or radionuclide, and/or means to enhance serum half-life, etc.

[0034] The term “binding domain” characterizes in connection with the present invention a domain which is capable of specifically binding to/interacting with a given target epitope or a given target siteon the target molecules BCMA and CD3.

[0035] Binding domains can be derived from a binding domain donor such as for example an antibody, protein A, ImmE7 (immunity proteins), BPTI/APPI (Kunitz domains), Ras-binding protein AF-6 (PDZ-domains), charybdotoxin (Scorpion toxin), CTLA-4, Min-23 (knottins), lipocalins (anticalins), neokarzinostatin, a fibronectin domain, an ankyrin consensus repeat domain or thioredoxin (Skerra, Curr. Opin. Biotechnol. 18, 295-304 (2005); Hosse et al., Protein Sci. 15, 14-27 (2006); Nicaise et al., Protein Sci. 13, 1882-1891 (2004); Nygren and Uhlen, Curr. Opin. Struc. Biol. 7, 463-469 (1997)). A preferred binding domain is derived from an antibody. It is envisaged that a binding domain of the present invention comprises at least said part of any of the aforementioned binding domains that is required for binding to/interacting with a given target epitope or a given target site on the target molecules BCMA and CD3.

[0036] It is envisaged that the binding domain of the aforementioned binding domain donors is characterized by that part of these donors that is responsible for binding the respective target, i.e. when that part is removed from the binding domain donor, said donor loses its binding capability. “Loses” means a reduction of at least 50% of the binding capability when compared with the binding donor. Methods to map these binding sites are well known in the art—it is therefore within the standard knowledge of the skilled person to locate/map the binding site of a binding domain donor and, thereby, to “derive” said binding domain from the respective binding domain donors.

[0037] The term “epitope” refers to a site on an antigen to which a binding domain, such as an antibody or immunoglobulin or derivative or fragment of an antibody or of an immunoglobulin, specifically binds. An “epitope” is antigenic and thus the term epitope is sometimes also referred to herein as “antigenic structure” or “antigenic determinant”. Thus, the binding domain is an “antigen-interaction-site”. Said binding/interaction is also understood to define a “specific recognition”. In one example, said binding domain which (specifically) binds to/interacts with a given target epitope or a given target siteon the target molecules BCMA and CD3 is an antibody or immunoglobulin, and said binding domain is a VH and/or VL region of an antibody or of an immunoglobulin.

[0038] “Epitopes” can be formed both by contiguous amino acids or non-contiguous amino acids juxtaposed by tertiary folding of a protein. A “linear epitope” is an epitope where an amino acid primary sequence comprises the recognizedepitope. A linear epitope typically includes at least 3 or at least 4, and more usually, at least 5 or at least 6 or at least 7, for example, about 8 to about 10 amino acids in a unique sequence.

[0039] A “conformational epitope”, in contrast to a linear epitope, is an epitope wherein the primary sequence of the amino acids comprising the epitope is not the sole defining component of the epitope recognized (e.g., an epitope wherein the primary sequence of amino acids is not necessarily recognized by the binding domain). Typically a conformational epitope comprises an increased number of amino acids relative to a linear epitope. With regard to recognition of conformational epitopes, the binding domain recognizes a three-dimensional structure of the antigen, preferably a peptide or protein or fragment thereof (in the context of the present invention, the antigen for one of the binding domains is comprised within the BCMA protein). For example, when a protein molecule folds to form a three-dimensional structure, certain amino acids and/or the polypeptide backbone forming the conformational epitope become juxtaposed enabling the antibody to recognize the epitope. Methods of determining the conformation of epitopes include, but are not limited to, x-ray crystallography, two-dimensional nuclear magnetic resonance (2D-NMR) spectroscopy and site-directed spin labelling and electron paramagnetic resonance (EPR) spectroscopy. Moreover, the provided examples describe a further method to test whether a given binding domain binds to one or more epitope cluster(s) of a given protein, in particular BCMA.

[0040] In one aspect, the first binding domain of the present invention is capable of binding to epitope cluster 3 of human BCMA, preferably human BCMA ECD. Accordingly, when the respective epitope cluster in the human BCMA protein is exchanged with the respective epitope cluster of a murine BCMA antigen (resulting in a construct comprising human BCMA, wherein human epitope cluster 3 is replaced with murine epitope cluster 3; see SEQ ID NO: 1011), a decrease in the binding of the binding domain will occur. Said decrease is preferably at least 10%, 20%, 30%, 40%, 50%; more preferably at least 60%, 70%, 80%, 90%, 95% or even 100% in comparison to the respective epitope cluster in the human BCMA protein, whereby binding to the respective epitope cluster in the human BCMA protein is set to be 100%. It is envisaged that the aforementioned human BCMA/murine BCMA chimeras are expressed in CHO cells. It is also envisaged that the human BCMA/murine BCMA chimeras are fused with a transmembrane domain and/or cytoplasmic domain of a different membrane-bound protein such as EpCAM; see FIG. 2a.

[0041] A method to test this loss of binding due to exchange with the respective epitope cluster of a non-human (e.g. murine) BCMA antigen is described in the appended Examples, in particular in Examples 1-3. A further method to determine the contribution of a specific residue of a target antigen to the recognition by a given binding molecule or binding domain is alanine scanning (see e.g. Morrison K L & Weiss G A. Cur Opin Chem. Biol. 2001 June; 5(3):302-7), where each residue to be analyzed is replaced by alanine, e.g. via site-directed mutagenesis. Alanine is used because of its non-bulky, chemically inert, methyl functional group that nevertheless mimics the secondary structure references that many of the other amino acids possess. Sometimes bulky amino acids such as valine or leucine can be used in cases where conservation of the size of mutated residues is desired. Alanine scanning is a mature technology which has been used for a long period of time. As used herein, the term “epitope cluster” denotes the entirety of epitopes lying in a defined contiguous stretch of an antigen. An epitope cluster can comprise one, two or more epitopes. The epitope clusters that were defined—in the context of the present invention—in the extracellular domain of BCMA are described above and depicted in FIG. 1.

[0042] The terms “(capable of) binding to”, “specifically recognizing”, “directed to” and “reacting with” mean in accordance with this invention that a binding domain is capable of specifically interacting with one or more, preferably at least two, more preferably at least three and most preferably at least four amino acids of an epitope.

[0043] As used herein, the terms “specifically interacting”, “specifically binding” or “specifically bind(s)” mean that a binding domain exhibits appreciable affinity for a particular protein or antigen and, generally, does not exhibit significant reactivity with proteins or antigens other than BCMA or CD3. “Appreciable affinity” includes binding with an affinity of about 10⁻⁶M (KD) or stronger. Preferably, binding is considered specific when binding affinity is about 10⁻¹² to 10⁻⁸ M, 10⁻¹² to 10⁻⁹ M, 10⁻¹² to 10⁻¹⁰ M, 10¹¹ to 10⁻⁸ M, preferably of about 10⁻¹¹ to 10⁻⁹ M. Whether a binding domain specifically reacts with or binds to a target can be tested readily by, inter alia, comparing the reaction of said binding domain with a target protein or antigen with the reaction of said binding domain with proteins or antigens other than BCMA or CD3. Preferably, a binding domain of the invention does not essentially bind or is not capable of binding to proteins or antigens other than BCMA or CD3 (i.e. the first binding domain is not capable of binding to proteins other than BCMA and the second binding domain is not capable of binding to proteins other than CD3).

[0044] The term “does not essentially bind”, or “is not capable of binding” means that a binding domain of the present invention does not bind another protein or antigen other than BCMA or CD3, i.e., does not show reactivity of more than 30%, preferably not more than 20%, more preferably not more than 10%, particularly preferably not more than 9%, 8%, 7%, 6% or 5% with proteins or antigens other than BCMA or CD3, whereby binding to BCMA or CD3, respectively, is set to be 100%.

[0045] Specific binding is believed to be effected by specific motifs in the amino acid sequence of the binding domain and the antigen. Thus, binding is achieved as a result of their primary, secondary and/or tertiary structure as well as the result of secondary modifications of said structures. The specific interaction of the antigen-interaction-site with its specific antigen may result in a simple binding of said site to the antigen. Moreover, the specific interaction of the antigen-interaction-site with its specific antigen may alternatively or additionally result in the initiation of a signal, e.g. due to the induction of a change of the conformation of the antigen, an oligomerization of the antigen, etc.

[0046] In one aspect, the first binding domain of the present invention binds to epitope cluster 3 of human BCMA and is further capable of binding to epitope cluster 3 of macaque BCMA such as BCMA from Macaca mulatta (SEQ ID NO:1017) or Macaca fascicularis (SEQ ID NO:1017). It is envisaged that the first binding domain does or does not bind to murine BCMA.

[0047] Accordingly, in one embodiment, a binding domain which binds to human BCMA, in particular to epitope cluster 3 of the extracellular protein domain of BCMA formed by amino acid residues 24 to 41 of the human sequence as depicted in SEQ ID NO: 1002, also binds to macaque BCMA, in particular to epitope cluster 3 of the extracellular protein domain of BCMA formed by amino acid residues 24 to 41 of the macaque BCMA sequence as depicted in SEQ ID NO: 1006.

[0048] In one embodiment, a first binding domain of a binding molecule is capable of binding to epitope cluster 3 of BCMA, wherein epitope cluster 3 of BCMA corresponds to amino acid residues 24 to 41 of the sequence as depicted in SEQ ID NO: 1002 (human BCMA full-length polypeptide) or SEQ ID NO: 1007 (human BCMA extracellular domain: amino acids 1-54 of SEQ ID NO: 1002).

[0049] In one aspect of the present invention, the first binding domain of the binding molecule is additionally or alternatively capable of binding to epitope cluster 3 of Caffithrix jacchus, Saguinus oedipus and/or Saimiri sciureus BCMA.

[0050] Proteins (including fragments thereof, preferably biologically active fragments, and peptides, usually having less than 30 amino acids) comprise one or more amino acids coupled to each other via a covalent peptide bond (resulting in a chain of amino acids). The term “polypeptide” as used herein describes a group of molecules, which consist of more than 30 amino acids. Polypeptides may further form multimers such as dimers, trimers and higher oligomers, i.e. consisting of more than one polypeptide molecule. Polypeptide molecules forming such dimers, trimers etc. may be identical or non-identical. The corresponding higher order structures of such multimers are, consequently, termed homo- or heterodimers, homo- or heterotrimers etc. An example for a hereteromultimer is an antibody molecule, which, in its naturally occurring form, consists of two identical light polypeptide chains and two identical heavy polypeptide chains. The terms “polypeptide” and “protein” also refer to naturally modified polypeptides/proteins wherein the modification is effected e.g. by post-translational modifications like glycosylation, acetylation, phosphorylation and the like. A “polypeptide” when referred to herein may also be chemically modified such as pegylated. Such modifications are well known in the art.

[0051] In another aspect of the invention, the second binding domain is capable of binding to CD3 epsilon. In still another aspect of the invention, the second binding domain is capable of binding to human CD3 and to macaque CD3, preferably to human CD3 epsilon and to macaque CD3 epsilon. Additionally or alternatively, the second binding domain is capable of binding to Callithrix jacchus, Saguinus oedipus and/or Saimiri sciureus CD3 epsilon. According to these embodiments, one or both binding domains of the binding molecule of the invention are preferably cross-species specific for members of the mammalian order of primates. Cross-species specific CD3 binding domains are, for example, described in WO 2008/119567.

[0052] It is particularly preferred for the binding molecule of the present invention that the second binding domain capable of binding to the T cell CD3 receptor complex comprises a VL region comprising CDR-L1, CDR-L2 and CDR-L3 selected from:
[0053] (a) CDR-L1 as depicted in SEQ ID NO: 27 of WO 2008/119567, CDR-L2 as depicted in SEQ ID NO: 28 of WO 2008/119567 and CDR-L3 as depicted in SEQ ID NO: 29 of WO 2008/119567;
[0054] (b) CDR-L1 as depicted in SEQ ID NO: 117 of WO 2008/119567, CDR-L2 as depicted in SEQ ID NO: 118 of WO 2008/119567 and CDR-L3 as depicted in SEQ ID NO: 119 of WO 2008/119567; and
[0055] (c) CDR-L1 as depicted in SEQ ID NO: 153 of WO 2008/119567, CDR-L2 as depicted in SEQ ID NO: 154 of WO 2008/119567 and CDR-L3 as depicted in SEQ ID NO: 155 of WO 2008/119567.

[0056] In an alternatively preferred embodiment of the binding molecule of the present invention, the second binding domain capable of binding to the T cell CD3 receptor complex comprises a VH region comprising CDR-H1, CDR-H2 and CDR-H3 selected from:
[0057] (a) CDR-H1 as depicted in SEQ ID NO: 12 of WO 2008/119567, CDR-H2 as depicted in SEQ ID NO: 13 of WO 2008/119567 and CDR-H3 as depicted in SEQ ID NO: 14 of WO 2008/119567;
[0058] (b) CDR-H1 as depicted in SEQ ID NO: 30 of WO 2008/119567, CDR-H2 as depicted in SEQ ID NO: 31 of WO 2008/119567 and CDR-H3 as depicted in SEQ ID NO: 32 of WO 2008/119567;
[0059] (c) CDR-H1 as depicted in SEQ ID NO: 48 of WO 2008/119567, CDR-H2 as depicted in SEQ ID NO: 49 of WO 2008/119567 and CDR-H3 as depicted in SEQ ID NO: 50 of WO 2008/119567;
[0060] (d) CDR-H1 as depicted in SEQ ID NO: 66 of WO 2008/119567, CDR-H2 as depicted in SEQ ID NO: 67 of WO 2008/119567 and CDR-H3 as depicted in SEQ ID NO: 68 of WO 2008/119567;
[0061] (e) CDR-H1 as depicted in SEQ ID NO: 84 of WO 2008/119567, CDR-H2 as depicted in SEQ ID NO: 85 of WO 2008/119567 and CDR-H3 as depicted in SEQ ID NO: 86 of WO 2008/119567;
[0062] (f) CDR-H1 as depicted in SEQ ID NO: 102 of WO 2008/119567, CDR-H2 as depicted in SEQ ID NO: 103 of WO 2008/119567 and CDR-H3 as depicted in SEQ ID NO: 104 of WO 2008/119567;
[0063] (g) CDR-H1 as depicted in SEQ ID NO: 120 of WO 2008/119567, CDR-H2 as depicted in SEQ ID NO: 121 of WO 2008/119567 and CDR-H3 as depicted in SEQ ID NO: 122 of WO 2008/119567;
[0064] (h) CDR-H1 as depicted in SEQ ID NO: 138 of WO 2008/119567, CDR-H2 as depicted in SEQ ID NO: 139 of WO 2008/119567 and CDR-H3 as depicted in SEQ ID NO: 140 of WO 2008/119567;
[0065] (i) CDR-H1 as depicted in SEQ ID NO: 156 of WO 2008/119567, CDR-H2 as depicted in SEQ ID NO: 157 of WO 2008/119567 and CDR-H3 as depicted in SEQ ID NO: 158 of WO 2008/119567; and
[0066] (j) CDR-H1 as depicted in SEQ ID NO: 174 of WO 2008/119567, CDR-H2 as depicted in SEQ ID NO: 175 of WO 2008/119567 and CDR-H3 as depicted in SEQ ID NO: 176 of WO 2008/119567.

[0067] It is further preferred for the binding molecule of the present invention that the second binding domain capable of binding to the T cell CD3 receptor complex comprises a VL region selected from the group consisting of a VL region as depicted in SEQ ID NO: 35, 39, 125, 129, 161 or 165 of WO 2008/119567.

[0068] It is alternatively preferred that the second binding domain capable of binding to the T cell CD3 receptor complex comprises a VH region selected from the group consisting of a VH region as depicted in SEQ ID NO: 15, 19, 33, 37, 51, 55, 69, 73, 87, 91, 105, 109, 123, 127, 141, 145, 159, 163, 177 or 181 of WO 2008/119567.

[0069] More preferably, the binding molecule of the present invention is characterized by the second binding domain capable of binding to the T cell CD3 receptor complex comprising a VL region and a VH region selected from the group consisting of:
[0070] (a) a VL region as depicted in SEQ ID NO: 17 or 21 of WO 2008/119567 and a VH region as depicted in SEQ ID NO: 15 or 19 of WO 2008/119567;
[0071] (b) a VL region as depicted in SEQ ID NO: 35 or 39 of WO 2008/119567 and a VH region as depicted in SEQ ID NO: 33 or 37 of WO 2008/119567;
[0072] (c) a VL region as depicted in SEQ ID NO: 53 or 57 of WO 2008/119567 and a VH region as depicted in SEQ ID NO: 51 or 55 of WO 2008/119567;
[0073] (d) a VL region as depicted in SEQ ID NO: 71 or 75 of WO 2008/119567 and a VH region as depicted in SEQ ID NO: 69 or 73 of WO 2008/119567;
[0074] (e) a VL region as depicted in SEQ ID NO: 89 or 93 of WO 2008/119567 and a VH region as depicted in SEQ ID NO: 87 or 91 of WO 2008/119567;
[0075] (f) a VL region as depicted in SEQ ID NO: 107 or 111 of WO 2008/119567 and a VH region as depicted in SEQ ID NO: 105 or 109 of WO 2008/119567;
[0076] (g) a VL region as depicted in SEQ ID NO: 125 or 129 of WO 2008/119567 and a VH region as depicted in SEQ ID NO: 123 or 127 of WO 2008/119567;
[0077] (h) a VL region as depicted in SEQ ID NO: 143 or 147 of WO 2008/119567 and a VH region as depicted in SEQ ID NO: 141 or 145 of WO 2008/119567;
[0078] (i) a VL region as depicted in SEQ ID NO: 161 or 165 of WO 2008/119567 and a VH region as depicted in SEQ ID NO: 159 or 163 of WO 2008/119567; and
[0079] (j) a VL region as depicted in SEQ ID NO: 179 or 183 of WO 2008/119567 and a VH region as depicted in SEQ ID NO: 177 or 181 of WO 2008/119567.

[0080] According to a preferred embodiment of the binding molecule of the present invention, in particular the second binding domain capable of binding to the T cell CD3 receptor complex, the pairs of VH-regions and VL-regions are in the format of a single chain antibody (scFv). The VH and VL regions are arranged in the order VH-VL or VL-VH. It is preferred that the VH-region is positioned N-terminally to a linker sequence. The VL-region is positioned C-terminally of the linker sequence.

[0081] A preferred embodiment of the above described binding molecule of the present invention is characterized by the second binding domain capable of binding to the T cell CD3 receptor complex comprising an amino acid sequence selected from the group consisting of SEQ ID NOs: 23, 25, 41, 43, 59, 61, 77, 79, 95, 97, 113, 115, 131, 133, 149, 151, 167, 169, 185 or 187 of WO 2008/119567.

[0082] The affinity of the first binding domain for human BCMA is preferably ≦15 nM, more preferably ≦10 nM, even more preferably ≦5 nM, even more preferably ≦1 nM, even more preferably ≦0.5 nM, even more preferably ≦0.1 nM, and most preferably ≦0.05 nM. The affinity of the first binding domain for macaque BCMA is preferably nM, more preferably ≦10 nM, even more preferably ≦5 nM, even more preferably ≦1 nM, even more preferably ≦0.5 nM, even more preferably ≦0.1 nM, and most preferably ≦0.05 nM or even ≦0.01 nM. The affinity can be measured for example in a Biacore assay or in a Scatchard assay, e.g. as described in the Examples. The affinity gap for binding to macaque BCMA versus human BCMA is preferably [1:10-1:5] or [5:1-10:1], more preferably [1:5-5:1], and most preferably [1:2-3:1] or even [1:1-3:1]. Other methods of determining the affinity are well-known to the skilled person.

[0083] Cytotoxicity mediated by BCMA/CD3 bispecific binding molecules can be measured in various ways. Effector cells can be e.g. stimulated enriched (human) CD8 positive T cells or unstimulated (human) peripheral blood mononuclear cells (PBMC). If the target cells are of macaque origin or express or are transfected with macaque BCMA, the effector cells should also be of macaque origin such as a macaque T cell line, e.g. 4119LnPx. The target cells should express (at least the extracellular domain of) BCMA, e.g. human or macaque BCMA. Target cells can be a cell line (such as CHO) which is stably or transiently transfected with BCMA, e.g. human or macaque BCMA. Alternatively, the target cells can be a BCMA positive natural expresser cell line, such as the human multiple myeloma cell line L363 or NCI-H929. Usually EC50-values are expected to be lower with target cell lines expressing higher levels of BCMA on the cell surface. The effector to target cell (E:T) ratio is usually about 10:1, but can also vary. Cytotoxic activity of BCMA/CD3 bispecific binding molecules can be measured in an 51-chromium release assay (incubation time of about 18 hours) or in a in a FACS-based cytotoxicity assay (incubation time of about 48 hours). Modifications of the assay incubation time (cytotoxic reaction) are also possible. Other methods of measuring cytotoxicity are well-known to the skilled person and comprise MTT or MTS assays, ATP-based assays including bioluminescent assays, the sulforhodamine B (SRB) assay, WST assay, clonogenic assay and the ECIS technology.

[0084] The cytotoxic activity mediated by BCMA/CD3 bispecific binding molecules of the present invention is preferably measured in a cell-based cytotoxicity assay. It is represented by the EC₅₀ value, which corresponds to the half maximal effective concentration (concentration of the binding molecule which induces a cytotoxic response halfway between the baseline and maximum). Preferably, the EC₅₀ value of the BCMA/CD3 bispecific binding molecules is ≦20.000 pg/ml, more preferably ≦5000 pg/ml, even more preferably ≦1000 pg/ml, even more preferably ≦500 pg/ml, even more preferably ≦350 pg/ml, even more preferably ≦320 pg/ml, even more preferably ≦250 pg/ml, even more preferably ≦100 pg/ml, even more preferably ≦50 pg/ml, even more preferably ≦10 pg/ml, and most preferably ≦5 pg/ml.

[0085] Any of the above given EC₅₀ values can be combined with any one of the indicated scenarios of a cell-based cytotoxicity assay. For example, when (human) CD8 positive T cells or a macaque T cell line are used as effector cells, the EC₅₀ value of the BCMA/CD3 bispecific binding molecule is preferably ≦1000 pg/ml, more preferably ≦500 pg/ml, even more preferably ≦250 pg/ml, even more preferably ≦100 pg/ml, even more preferably ≦50 pg/ml, even more preferably ≦10 pg/ml, and most preferably ≦5 pg/ml. If in this assay the target cells are (human or macaque) BCMA transfected cells such as CHO cells, the EC₅₀ value of the BCMA/CD3 bispecific binding molecule is preferably ≦150 pg/ml, more preferably ≦100 pg/ml, even more preferably ≦50 pg/ml, even more preferably ≦30 pg/ml, even more preferably ≦10 pg/ml, and most preferably ≦5 pg/ml.

[0086] If the target cells are a BCMA positive natural expresser cell line, then the EC₅₀ value is preferably ≦350 pg/ml, more preferably ≦320 pg/ml, even more preferably ≦250 pg/ml, even more preferably ≦200 pg/ml, even more preferably ≦100 pg/ml, even more preferably ≦150 pg/ml, even more preferably ≦100 pg/ml, and most preferably ≦50 pg/ml, or lower.

[0087] When (human) PBMCs are used as effector cells, the EC₅₀ value of the BCMA/CD3 bispecific binding molecule is preferably ≦1000 pg/ml, more preferably ≦750 pg/ml, more preferably ≦500 pg/ml, even more preferably ≦350 pg/ml, even more preferably ≦320 pg/ml, even more preferably ≦250 pg/ml, even more preferably ≦100 pg/ml, and most preferably ≦50 pg/ml, or lower. In a particularly preferred embodiment, the BCMA/CD3 bispecific binding molecules of the present invention are characterized by an EC50 of ≦350 pg/ml or less, more preferably ≦320 pg/ml or less. In that embodiment the target cells are L363 cells and the effector cells are unstimulated human PBMCs. The skilled person knows how to measure the EC50 value without further ado. Moreover, the specification teaches a specific instruction how to measure the EC50 value; see, for example, Example 8.3, below. A suitable protocol is as follows:

a) Prepare human peripheral blood mononuclear cells (PBMC) by Ficoll density gradient centrifugation from enriched lymphocyte preparations (buffy coats)
b) Optionally wash with Dulbecco's PBS (Gibco)
c) Remove remaining erythrocytes from PBMC via incubation with erythrocyte lysis buffer (155 mM NH₄Cl, 10 mM KHCO₃, 100 μM EDTA)
c) Remove platelets via the supernatant upon centrifugation of PBMC at 100×g
d) Deplete CD14⁺ cells and NK cells
e) Isolate CD14/CD56 negative cells using, e.g. LS Columns (Miltenyi Biotec, #130-042-401)
f) Culture PBMC w/o CD14+/CD56+ cells, e.g. in RPMI complete medium i.e. RPMI1640 (Biochrom AG, #FG1215) supplemented with 10% FBS (Biochrom AG, #S0115), 1× non-essential amino acids (Biochrom AG, #K0293), 10 mM Hepes buffer (Biochrom AG, #L1613), 1 mM sodium pyruvate (Biochrom AG, #L0473) and 100 U/mL penicillin/streptomycin (Biochrom AG, #A2213) at 37° C. in an incubator until needed.
g) Label target cells
h) Mix effector and target cells, preferably at equal volumes, so as to have an E:T cell ratio of 10:1
i) Add the binding molecule, preferably in a serial dilution
j) Proceed for 48 hours in a 7% CO₂ humidified incubator
k) Monitor target cell membrane integrity, e.g., by adding propidium iodide (PI) at a final concentration of 1 μg/mL, for example, by flow cytometry
l) Calculate EC50, e.g., according to the following formula:

$$Cytotoxicity [ \% ] = \frac{{n}_{dead target cells}}{{n}_{target cells}} \times 100$$

$$n = number of events$$

[0088] Using GraphPad Prism 5 software (Graph Pad Software, San Diego), the percentage of cytotoxicity was plotted against the corresponding bispecific antibody concentrations. Dose response curves can be analyzed with the four parametric logistic regression models for evaluation of sigmoid dose response curves with fixed hill slope and EC50 values were calculated.

[0089] In view of the above, it is preferred that the binding molecule of the present invention is characterized by an EC50 (pg/ml) of 350 or less, preferably 320 or less.

[0090] The present invention also relates to binding molecules described herein which are characterized by an EC50 (pg/ml) which equates to the EC50 (pg/ml) of any one of the BCMA/CD3 bispecific binding molecules BCMA-83×CD3, BCMA-62×CD3, BCMA-5×CD3, BCMA-98×CD3, BCMA-71×CD3, BCMA-34×CD3, BCMA-74×CD3, BCMA-20×CD3. In order to determine as to whether the EC50 of a binding molecule as described herein equates to the EC50 of any one of BCMA-83×CD3, BCMA-62×CD3, BCMA-5×CD3, BCMA-98×CD3, BCMA-71×CD3, BCMA-34×CD3, BCMA-74×CD3, BCMA-20×CD3, it is envisaged that for the determination of the EC50 value the same assay is applied. The term “equates to” includes thereby a deviation of +/−10%, preferably +/−7.5%, more preferably +/−5%, even more preferably +/−2.5% of the respective EC50 value.

[0091] The BCMA/CD3 bispecific binding molecules BCMA-83×CD3, BCMA-62×CD3, BCMA-5×CD3, BCMA-98×CD3, BCMA-71×CD3, BCMA-34×CD3, BCMA-74×CD3, BCMA-20×CD3 that serve as “reference” binding molecules in the above described assay are preferably produced in CHO cells.

[0092] The difference in cytotoxic activity between the monomeric and the dimeric isoform of individual BCMA/CD3 bispecific binding molecules (such as antibodies) is referred to as “potency gap”. This potency gap can e.g. be calculated as ratio between EC₅₀ values of the molecule's monomeric and dimeric form. Potency gaps of the BCMA/CD3 bispecific binding molecules of the present invention are preferably ≦5, more preferably ≦4, even more preferably ≦3, even more preferably ≦2 and most preferably ≦1.

[0093] Preferably, the BCMA/CD3 bispecific binding molecules of the present invention do not bind to, interact with, recognize or cross-react with human BAFF-R and/or human TACI. Methods to detect cross-reactivity with human BAFF-R and/or human TACI are disclosed in Example 9.

[0094] It is also preferred that the BCMA/CD3 bispecific binding molecules of the present invention present with very low dimer conversion after a number of freeze/thaw cycles. Preferably the dimer percentages are ≦5%, more preferably ≦4%, even more preferably ≦3%, even more preferably ≦2.5%, even more preferably ≦2%, even more preferably ≦1.5%, and most preferably ≦1%, for example after three freeze/thaw cycles. A freeze-thaw cycle and the determination of the dimer percentage can be carried out in accordance with Example 16.

[0095] The BCMA/CD3 bispecific binding molecules (such as antibodies) of the present invention preferably show a favorable thermostability with melting temperatures above 60° C.

[0096] To determine potential interaction of BCMA/CD3 bispecific binding molecules (such as antibodies) with human plasma proteins, a plasma interference test can be carried out (see e.g. Example 18). In a preferred embodiment, there is no significant reduction of target binding of the BCMA/CD3 bispecific binding molecules mediated by plasma proteins. The relative plasma interference value is preferably ≦2.

[0097] It is furthermore envisaged that the BCMA/CD3 bispecific binding molecules of the present invention are capable of exhibiting therapeutic efficacy or anti-tumor activity. This can be assessed e.g. in a study as disclosed in Example 19 (advanced stage human tumor xenograft model). The skilled person knows how to modify or adapt certain parameters of this study, such as the number of injected tumor cells, the site of injection, the number of transplanted human T cells, the amount of BCMA/CD3 bispecific binding molecules to be administered, and the timelines, while still arriving at a meaningful and reproducible result. Preferably, the tumor growth inhibition T/C [%] is 70 or 60 or lower, more preferably 50 or 40 or lower, even more preferably at least 30 or 20 or lower and most preferably 10 or lower, 5 or lower or even 2.5 or lower.

[0098] Preferably, the BCMA/CD3 bispecific binding molecules of the present invention do not induce/mediate lysis or do not essentially induce/mediate lysis of BCMA negative cells such as HL60, MES-SA, and SNU-16. The term “do not induce lysis”, “do not essentially induce lysis”, “do not mediate lysis” or “do not essentially mediate lysis” means that a binding molecule of the present invention does not induce or mediate lysis of more than 30%, preferably not more than 20%, more preferably not more than 10%, particularly preferably not more than 9%, 8%, 7%, 6% or 5% of BCMA negative cells, whereby lysis of a BCMA positive cell line such as NCI-H929, L-363 or OPM-2 is set to be 100%. This applies for concentrations of the binding molecule of at least up to 500 nM. The skilled person knows how to measure cell lysis without further ado. Moreover, the specification teaches a specific instruction how to measure cell lysis; see e.g. Example 20 below.

[0099] In one embodiment, the first or the second binding domain is or is derived from an antibody. In another embodiment, both binding domains are or are derived from an antibody.

[0100] The definition of the term “antibody” includes embodiments such as monoclonal, chimeric, single chain, humanized and human antibodies. In addition to full-length antibodies, the definition also includes antibody derivatives and antibody fragments, like, inter alia, Fab fragments. Antibody fragments or derivatives further comprise F(ab′)₂, Fv, scFv fragments or single domain antibodies such as domain antibodies or nanobodies, single variable domain antibodies or immunoglobulin single variable domain comprising merely one variable domain, which might be VHH, VH or VL, that specifically bind an antigen or epitope independently of other V regions or domains; see, for example, Harlow and Lane (1988) and (1999), loc. cit.; Kontermann and Dübel, Antibody Engineering, Springer, 2nd ed. 2010 and Little, Recombinant Antibodies for Immunotherapy, Cambridge University Press 2009. Said term also includes diabodies or Dual-Affinity Re-Targeting (DART) antibodies. Further envisaged are (bispecific) single chain diabodies, tandem diabodies (Tandab's), “minibodies” exemplified by a structure which is as follows: (VH-VL-CH3)₂, (scFv-CH3)₂ or (scFv-CH3-scFv)₂, “Fc DART” antibodies and “IgG DART” antibodies, and multibodies such as triabodies. Immunoglobulin single variable domains encompass not only an isolated antibody single variable domain polypeptide, but also larger polypeptides that comprise one or more monomers of an antibody single variable domain polypeptide sequence.

[0101] Various procedures are known in the art and may be used for the production of such antibodies and/or fragments. Thus, (antibody) derivatives can be produced by peptidomimetics. Further, techniques described for the production of single chain antibodies (see, inter alia, U.S. Pat. No. 4,946,778, Kontermann and Dübel (2010), loc. cit. and Little(2009), loc. cit.) can be adapted to produce single chain antibodies specific for elected polypeptide(s). Also, transgenic animals may be used to express humanized antibodies specific for polypeptides and fusion proteins of this invention. For the preparation of monoclonal antibodies, any technique, providing antibodies produced by continuous cell line cultures can be used. Examples for such techniques include the hybridoma technique (Köhler and Milstein Nature 256 (1975), 495-497), the trioma technique, the human B cell hybridoma technique (Kozbor, Immunology Today 4 (1983), 72) and the EBV hybridoma technique to produce human monoclonal antibodies (Cole et al., Monoclonal Antibodies and Cancer Therapy, Alan R. Liss, Inc. (1985), 77-96). Surface plasmon resonance as employed in the BIAcore system can be used to increase the efficiency of phage antibodies which bind to an epitope of a target polypeptide, such as CD3 epsilon (Schier, Human Antibodies Hybridomas 7 (1996), 97-105; Malmborg, J. Immunol. Methods 183 (1995), 7-13). It is also envisaged in the context of this invention that the term “antibody” comprises antibody constructs, which may be expressed in a host as described herein below, e.g. antibody constructs which may be transfected and/or transduced via, inter alia, viruses or plasmid vectors.

[0102] Furthermore, the term “antibody” as employed herein also relates to derivatives or variants of the antibodies described herein which display the same specificity as the described antibodies. Examples of “antibody variants” include humanized variants of non-human antibodies, “affinity matured” antibodies (see, e.g. Hawkins et al. J. Mol. Biol. 254, 889-896 (1992) and Lowman et al., Biochemistry 30, 10832-10837 (1991)) and antibody mutants with altered effector function(s) (see, e.g., U.S. Pat. No. 5,648,260, Kontermann and Dübel (2010), loc. cit. and Little (2009), loc. cit.).

[0103] The terms “antigen-binding domain”, “antigen-binding fragment” and “antibody binding region” when used herein refer to a part of an antibody molecule that comprises amino acids responsible for the specific binding between antibody and antigen. The part of the antigen that is specifically recognized and bound by the antibody is referred to as the “epitope” as described herein above. As mentioned above, an antigen-binding domain may typically comprise an antibody light chain variable region (VL) and an antibody heavy chain variable region (VH); however, it does not have to comprise both. Fd fragments, for example, have two VH regions and often retain some antigen-binding function of the intact antigen-binding domain. Examples of antigen-binding fragments of an antibody include (1) a Fab fragment, a monovalent fragment having the VL, VH, CL and CH1 domains; (2) a F(ab′)2 fragment, a bivalent fragment having two Fab fragments linked by a disulfide bridge at the hinge region; (3) an Fd fragment having the two VH and CH1 domains; (4) an Fv fragment having the VL and VH domains of a single arm of an antibody, (5) a dAb fragment (Ward et al., (1989) Nature 341:544-546), which has a VH domain; (6) an isolated complementarity determining region (CDR), and (7) a single chain Fv (scFv), the latter being preferred (for example, derived from a scFV-library). Although the two domains of the Fv fragment, VL and VH are coded for by separate genes, they can be joined, using recombinant methods, by a synthetic linker that enables them to be made as a single protein chain in which the VL and VH regions pair to form monovalent molecules (known as single chain Fv (scFv); see e.g., Huston et al. (1988) Proc. Natl. Acad. Sci. USA 85:5879-5883). These antibody fragments are obtained using conventional techniques known to those with skill in the art, and the fragments are evaluated for function in the same manner as are intact antibodies.

[0104] The term “monoclonal antibody” as used herein refers to an antibody obtained from a population of substantially homogeneous antibodies, i.e., the individual antibodies comprising the population are identical except for possible naturally occurring mutations and/or post-translation modifications (e.g., isomerizations, amidations) that may be present in minor amounts. Monoclonal antibodies are highly specific, being directed against a single antigenic site. Furthermore, in contrast to conventional (polyclonal) antibody preparations which typically include different antibodies directed against different determinants (epitopes), each monoclonal antibody is directed against a single determinant on the antigen. In addition to their specificity, the monoclonal antibodies are advantageous in that they are synthesized by the hybridoma culture, uncontaminated by other immunoglobulins. The modifier “monoclonal” indicates the character of the antibody as being obtained from a substantially homogeneous population of antibodies, and is not to be construed as requiring production of the antibody by any particular method. For example, the monoclonal antibodies to be used in accordance with the present invention may be made by the hybridoma method first described by Kohler et al., Nature, 256: 495 (1975), or may be made by recombinant DNA methods (see, e.g., U.S. Pat. No. 4,816,567). The “monoclonal antibodies” may also be isolated from phage antibody libraries using the techniques described in Clackson et al., Nature, 352: 624-628 (1991) and Marks et al., J. Mol. Biol., 222: 581-597 (1991), for example.

[0105] The monoclonal antibodies of the present invention specifically include “chimeric” antibodies (immunoglobulins) in which a portion of the heavy and/or light chain is identical with or homologous to corresponding sequences in antibodies derived from a particular species or belonging to a particular antibody class or subclass, while the remainder of the chain (s) is (are) identical with or homologous to corresponding sequences in antibodies derived from another species or belonging to another antibody class or subclass, as well as fragments of such antibodies, so long as they exhibit the desired biological activity (U.S. Pat. No. 4,816,567; Morrison et al., Proc. Natl. Acad. Sci. USA, 81: 6851-6855 (1984)). Chimeric antibodies of interest herein include “primitized” antibodies comprising variable domain antigen-binding sequences derived from a non-human primate (e.g., Old World Monkey, Ape etc.) and human constant region sequences.

[0106] “Humanized” forms of non-human (e.g., murine) antibodies are chimeric immunoglobulins, immunoglobulin chains or fragments thereof (such as Fv, Fab, Fab′, F(ab′)2 or other antigen-binding subsequences of antibodies) of mostly human sequences, which contain minimal sequence derived from non-human immunoglobulin. For the most part, humanized antibodies are human immunoglobulins (recipient antibody) in which residues from a hypervariable region (also CDR) of the recipient are replaced by residues from a hypervariable region of a non-human species (donor antibody) such as mouse, rat or rabbit having the desired specificity, affinity, and capacity. In some instances, Fv framework region (FR) residues of the human immunoglobulin are replaced by corresponding non-human residues. Furthermore, “humanized antibodies” as used herein may also comprise residues which are found neither in the recipient antibody nor the donor antibody. These modifications are made to further refine and optimize antibody performance. The humanized antibody optimally also will comprise at least a portion of an immunoglobulin constant region (Fc), typically that of a human immunoglobulin. For further details, see Jones et al., Nature, 321: 522-525 (1986); Reichmann et al., Nature, 332: 323-329 (1988); and Presta, Curr. Op. Struct. Biol., 2: 593-596 (1992).

[0107] The term “human antibody” includes antibodies having variable and constant regions corresponding substantially to human germline immunoglobulin sequences known in the art, including, for example, those described by Kabat et al. (See Kabat et al. (1991) loc. cit.). The human antibodies of the invention may include amino acid residues not encoded by human germline immunoglobulin sequences (e.g., mutations introduced by random or site-specific mutagenesis in vitro or by somatic mutation in vivo), for example in the CDRs, and in particular, CDR3. The human antibody can have at least one, two, three, four, five, or more positions replaced with an amino acid residue that is not encoded by the human germline immunoglobulin sequence.

[0108] As used herein, “in vitro generated antibody” refers to an antibody where all or part of the variable region (e.g., at least one CDR) is generated in a non-immune cell selection (e.g., an in vitro phage display, protein chip or any other method in which candidate sequences can be tested for their ability to bind to an antigen). This term thus preferably excludes sequences generated by genomic rearrangement in an immune cell.

[0109] A “bispecific” or “bifunctional” antibody or immunoglobulin is an artificial hybrid antibody or immunoglobulin having two different heavy/light chain pairs and two different binding sites. Bispecific antibodies can be produced by a variety of methods including fusion of hybridomas or linking of Fab′ fragments. See, e.g., Songsivilai & Lachmann, Clin. Exp. Immunol. 79:315-321 (1990). Numerous methods known to those skilled in the art are available for obtaining antibodies or antigen-binding fragments thereof. For example, antibodies can be produced using recombinant DNA methods (U.S. Pat. No. 4,816,567). Monoclonal antibodies may also be produced by generation of hybridomas (see e.g., Kohler and Milstein (1975) Nature, 256: 495-499) in accordance with known methods. Hybridomas formed in this manner are then screened using standard methods, such as enzyme-linked immunosorbent assay (ELISA) and surface plasmon resonance (BIACORE™) analysis, to identify one or more hybridomas that produce an antibody that specifically binds with a specified antigen. Any form of the specified antigen may be used as the immunogen, e.g., recombinant antigen, naturally occurring forms, any variants or fragments thereof, as well as antigenic peptide thereof.”

[0110] One exemplary method of making antibodies includes screening protein expression libraries, e.g., phage or ribosome display libraries. Phage display is described, for example, in Ladner et al., U.S. Pat. No. 5,223,409; Smith (1985) Science 228:1315-1317; Clackson et al., (1991) Nature, 352: 624-628.

[0111] In addition to the use of display libraries, the specified antigen can be used to immunize a non-human animal, e.g., a rodent, e.g., a mouse, hamster, or rat. In one embodiment, the non-human animal includes at least a part of a human immunoglobulin gene. For example, it is possible to engineer mouse strains deficient in mouse antibody production with large fragments of the human Ig loci. Using the hybridoma technology, antigen-specific monoclonal antibodies derived from the genes with the desired specificity may be produced and selected. See, e.g., XENOMOUSET™, Green et al. (1994) Nature Genetics 7:13-21, US 2003-0070185, WO 96/34096, and WO96/33735.

[0112] A monoclonal antibody can be obtained from a non-human animal, and then modified, e.g., humanized, deimmunized, chimeric, may be produced using recombinant DNA techniques known in the art. A variety of approaches for making chimeric antibodies have been described. See e.g., Morrison et al., Proc. Natl. Acad. ScL U.S.A. 81:6851, 1985; Takeda et al., Nature 314:452, 1985, Cabilly et al., U.S. Pat. No. 4,816,567; Boss et al., U.S. Pat. No. 4,816,397; Tanaguchi et al., EP 0171496; EP 0173494, GB 2177096. Humanized antibodies may also be produced, for example, using transgenic mice that express human heavy and light chain genes, but are incapable of expressing the endogenous mouse immunoglobulin heavy and light chain genes. Winter describes an exemplary CDR-grafting method that may be used to prepare the humanized antibodies described herein (U.S. Pat. No. 5,225,539). All of the CDRs of a particular human antibody may be replaced with at least a portion of a non-human CDR, or only some of the CDRs may be replaced with non-human CDRs. It is only necessary to replace the number of CDRs required for binding of the humanized antibody to a predetermined antigen.

[0113] Humanized antibodies or fragments thereof can be generated by replacing sequences of the Fv variable domain that are not directly involved in antigen binding with equivalent sequences from human Fv variable domains. Exemplary methods for generating humanized antibodies or fragments thereof are provided by Morrison (1985) Science 229:1202-1207; by Oi et al. (1986) BioTechniques 4:214; and by U.S. Pat. No. 5,585,089; U.S. Pat. No. 5,693,761; U.S. Pat. No. 5,693,762; U.S. Pat. No. 5,859,205; and U.S. Pat. No. 6,407,213. Those methods include isolating, manipulating, and expressing the nucleic acid sequences that encode all or part of immunoglobulin Fv variable domains from at least one of a heavy or light chain. Such nucleic acids may be obtained from a hybridoma producing an antibody against a predetermined target, as described above, as well as from other sources. The recombinant DNA encoding the humanized antibody molecule can then be cloned into an appropriate expression vector.

[0114] A humanized antibody can be optimized by the introduction of conservative substitutions, consensus sequence substitutions, germline substitutions and/or backmutations. Such altered immunoglobulin molecules can be made by any of several techniques known in the art, (e.g., Teng et al., Proc. Natl. Acad. Sci. U.S.A., 80: 7308-7312, 1983; Kozbor et al., Immunology Today, 4: 7279, 1983; Olsson et al., Meth. Enzymol., 92: 3-16, 1982), and may be made according to the teachings of EP 239 400.

[0115] An antibody or fragment thereof may also be modified by specific deletion of human T cell epitopes or “deimmunization” by the methods disclosed in WO 98/52976 and WO 00/34317. Briefly, the heavy and light chain variable domains of an antibody can be analyzed for peptides that bind to MHC class II; these peptides represent potential T cell epitopes (as defined in WO 98/52976 and WO 00/34317). For detection of potential T cell epitopes, a computer modeling approach termed “peptide threading” can be applied, and in addition a database of human MHC class II binding peptides can be searched for motifs present in the VH and VL sequences, as described in WO 98/52976 and WO 00/34317. These motifs bind to any of the 18 major MHC class II DR allotypes, and thus constitute potential T cell epitopes. Potential T-cell epitopes detected can be eliminated by substituting small numbers of amino acid residues in the variable domains, or preferably, by single amino acid substitutions. Typically, conservative substitutions are made. Often, but not exclusively, an amino acid common to a position in human germline antibody sequences may be used. Human germline sequences, e.g., are disclosed in Tomlinson, et al., (1992) J. Mol. Biol. 227:776-798; Cook, G. P. et al., (1995) Immunol. Today Vol. 16 (5): 237-242; and Tomlinson et al. (1995) EMBO J. 14: 14:4628-4638. The V BASE directory provides a comprehensive directory of human immunoglobulin variable region sequences (compiled by Tomlinson, L A. et al. MRC Centre for Protein Engineering, Cambridge, UK). These sequences can be used as a source of human sequence, e.g., for framework regions and CDRs. Consensus human framework regions can also be used, e.g., as described in U.S. Pat. No. 6,300,064.

[0116] The pairing of a VH and VL together forms a single antigen-binding site. The CH domain most proximal to VH is designated as CH1. Each L chain is linked to an H chain by one covalent disulfide bond, while the two H chains are linked to each other by one or more disulfide bonds depending on the H chain isotype. The VH and VL domains consist of four regions of relatively conserved sequences called framework regions (FR1, FR2, FR3, and FR4), which form a scaffold for three regions of hypervariable sequences (complementarity determining regions, CDRs). The CDRs contain most of the residues responsible for specific interactions of the antibody with the antigen. CDRs are referred to as CDR 1, CDR2, and CDR3. Accordingly, CDR constituents on the heavy chain are referred to as H1, H2, and H3, while CDR constituents on the light chain are referred to as L1, L2, and L3.

[0117] The term “variable” refers to the portions of the immunoglobulin domains that exhibit variability in their sequence and that are involved in determining the specificity and binding affinity of a particular antibody (i.e., the “variable domain(s)”). Variability is not evenly distributed throughout the variable domains of antibodies; it is concentrated in sub-domains of each of the heavy and light chain variable regions. These sub-domains are called “hypervariable” regions or “complementarity determining regions” (CDRs). The more conserved (i.e., non-hypervariable) portions of the variable domains are called the “framework” regions (FRM). The variable domains of naturally occurring heavy and light chains each comprise four FRM regions, largely adopting a 3-sheet configuration, connected by three hypervariable regions, which form loops connecting, and in some cases forming part of, the 3-sheet structure. The hypervariable regions in each chain are held together in close proximity by the FRM and, with the hypervariable regions from the other chain, contribute to the formation of the antigen-binding site (see Kabat et al., loc. cit.). The constant domains are not directly involved in antigen binding, but exhibit various effector functions, such as, for example, antibody-dependent, cell-mediated cytotoxicity and complement activation.

[0118] It is also preferred for the binding molecule of the invention that first and the second domain form a molecule that is selected from the group of (scFv)₂, (single domain mAb)₂, scFv-single domain mAb, diabody or oligomeres thereof.

[0119] The terms “CDR”, and its plural “CDRs”, refer to a complementarity determining region (CDR) of which three make up the binding character of a light chain variable region (CDRL1, CDRL2 and CDRL3) and three make up the binding character of a heavy chain variable region (CDRH1, CDRH2 and CDRH3). CDRs contribute to the functional activity of an antibody molecule and are separated by amino acid sequences that comprise scaffolding or framework regions. The exact definitional CDR boundaries and lengths are subject to different classification and numbering systems. CDRs may therefore be referred to by Kabat, Chothia, contact or any other boundary definitions, including the numbering system described herein. Despite differing boundaries, each of these systems has some degree of overlap in what constitutes the so called “hypervariable regions” within the variable sequences. CDR definitions according to these systems may therefore differ in length and boundary areas with respect to the adjacent framework region. See for example Kabat, Chothia, and/or MacCallum (Kabat et al., loc. cit.; Chothia et al., J. Mol. Biol, 1987, 196: 901; and MacCallum et al., J. Mol. Biol, 1996, 262: 732). However, the numbering in accordance with the so-called Kabat system is preferred.

[0120] The term “amino acid” or “amino acid residue” typically refers to an amino acid having its art recognized definition such as an amino acid selected from the group consisting of: alanine (Ala or A); arginine (Arg or R); asparagine (Asn or N); aspartic acid (Asp or D); cysteine (Cys or C); glutamine (Gln or Q); glutamic acid (Glu or E); glycine (Gly or G); histidine (His or H); isoleucine (He or I): leucine (Leu or L); lysine (Lys or K); methionine (Met or M); phenylalanine (Phe or F); pro line (Pro or P); serine (Ser or S); threonine (Thr or T); tryptophan (Trp or W); tyrosine (Tyr or Y); and valine (Val or V), although modified, synthetic, or rare amino acids may be used as desired. Generally, amino acids can be grouped as having a nonpolar side chain (e.g., Ala, Cys, He, Leu, Met, Phe, Pro, Val); a negatively charged side chain (e.g., Asp, Glu); a positively charged sidechain (e.g., Arg, His, Lys); or an uncharged polar side chain (e.g., Asn, Cys, Gln, Gly, His, Met, Phe, Ser, Thr, Trp, and Tyr).

[0121] The term “hypervariable region” (also known as “complementarity determining regions” or CDRs) when used herein refers to the amino acid residues of an antibody which are (usually three or four short regions of extreme sequence variability) within the V-region domain of an immunoglobulin which form the antigen-binding site and are the main determinants of antigen specificity. There are at least two methods for identifying the CDR residues: (1) An approach based on cross-species sequence variability (i.e., Kabat et al., loc. cit.); and (2) An approach based on crystallographic studies of antigen-antibody complexes (Chothia, C. et al., J. Mol. Biol. 196: 901-917 (1987)). However, to the extent that two residue identification techniques define regions of overlapping, but not identical regions, they can be combined to define a hybrid CDR. However, in general, the CDR residues are preferably identified in accordance with the so-called Kabat (numbering) system.

[0122] The term “framework region” refers to the art-recognized portions of an antibody variable region that exist between the more divergent (i.e., hypervariable) CDRs. Such framework regions are typically referred to as frameworks 1 through 4 (FR1, FR2, FR3, and FR4) and provide a scaffold for the presentation of the six CDRs (three from the heavy chain and three from the light chain) in three dimensional space, to form an antigen-binding surface.

[0123] Typically, CDRs form a loop structure that can be classified as a canonical structure. The term “canonical structure” refers to the main chain conformation that is adopted by the antigen binding (CDR) loops. From comparative structural studies, it has been found that five of the six antigen binding loops have only a limited repertoire of available conformations. Each canonical structure can be characterized by the torsion angles of the polypeptide backbone. Correspondent loops between antibodies may, therefore, have very similar three dimensional structures, despite high amino acid sequence variability in most parts of the loops (Chothia and Lesk, J. Mol. Biol., 1987, 196: 901; Chothia et al., Nature, 1989, 342: 877; Martin and Thornton, J. Mol. Biol, 1996, 263: 800, each of which is incorporated by reference in its entirety). Furthermore, there is a relationship between the adopted loop structure and the amino acid sequences surrounding it. The conformation of a particular canonical class is determined by the length of the loop and the amino acid residues residing at key positions within the loop, as well as within the conserved framework (i.e., outside of the loop). Assignment to a particular canonical class can therefore be made based on the presence of these key amino acid residues. The term “canonical structure” may also include considerations as to the linear sequence of the antibody, for example, as catalogued by Kabat (Kabat et al., loc. cit.). The Kabat numbering scheme (system) is a widely adopted standard for numbering the amino acid residues of an antibody variable domain in a consistent manner and is the preferred scheme applied in the present invention as also mentioned elsewhere herein. Additional structural considerations can also be used to determine the canonical structure of an antibody. For example, those differences not fully reflected by Kabat numbering can be described by the numbering system of Chothia et al and/or revealed by other techniques, for example, crystallography and two or three-dimensional computational modeling. Accordingly, a given antibody sequence may be placed into a canonical class which allows for, among other things, identifying appropriate chassis sequences (e.g., based on a desire to include a variety of canonical structures in a library). Kabat numbering of antibody amino acid sequences and structural considerations as described by Chothia et al., loc. cit. and their implications for construing canonical aspects of antibody structure, are described in the literature.

[0124] CDR3 is typically the greatest source of molecular diversity within the antibody-binding site. H3, for example, can be as short as two amino acid residues or greater than 26 amino acids. The subunit structures and three-dimensional configurations of different classes of immunoglobulins are well known in the art. For a review of the antibody structure, see Antibodies: A Laboratory Manual, Cold Spring Harbor Laboratory, eds. Harlow et al., 1988. One of skill in the art will recognize that each subunit structure, e.g., a CH, VH, CL, VL, CDR, FR structure, comprises active fragments, e.g., the portion of the VH, VL, or CDR subunit the binds to the antigen, i.e., the antigen-binding fragment, or, e.g., the portion of the CH subunit that binds to and/or activates, e.g., an Fc receptor and/or complement. The CDRs typically refer to the Kabat CDRs, as described in Sequences of Proteins of immunological Interest, US Department of Health and Human Services (1991), eds. Kabat et al. Another standard for characterizing the antigen binding site is to refer to the hypervariable loops as described by Chothia. See, e.g., Chothia, et al. (1987; J. Mol. Biol. 227:799-817); and Tomlinson et al. (1995) EMBO J. 14: 4628-4638. Still another standard is the AbM definition used by Oxford Molecular's AbM antibody modeling software. See, generally, e.g., Protein Sequence and Structure Analysis of Antibody Variable Domains. In: Antibody Engineering Lab Manual (Ed.: Duebel, S, and Kontermann, R., Springer-Verlag, Heidelberg). Embodiments described with respect to Kabat CDRs can alternatively be implemented using similar described relationships with respect to Chothia hypervariable loops or to the AbM-defined loops.

[0125] The sequence of antibody genes after assembly and somatic mutation is highly varied, and these varied genes are estimated to encode 10¹⁰ different antibody molecules (Immunoglobulin Genes, 2^{nd} ed., eds. Jonio et al., Academic Press, San Diego, Calif., 1995). Accordingly, the immune system provides a repertoire of immunoglobulins. The term “repertoire” refers to at least one nucleotide sequence derived wholly or partially from at least one sequence encoding at least one immunoglobulin. The sequence(s) may be generated by rearrangement in vivo of the V, D, and J segments of heavy chains, and the V and J segments of light chains. Alternatively, the sequence(s) can be generated from a cell in response to which rearrangement occurs, e.g., in vitro stimulation. Alternatively, part or all of the sequence(s) may be obtained by DNA splicing, nucleotide synthesis, mutagenesis, and other methods, see, e.g., U.S. Pat. No. 5,565,332. A repertoire may include only one sequence or may include a plurality of sequences, including ones in a genetically diverse collection.

[0126] In one embodiment, the first binding domain of the binding molecule of the invention comprises a VH region comprising CDR-H1, CDR-H2 and CDR-H3 and a VL region comprising CDR-L1, CDR-L2 and CDR-L3 selected from the group consisting of:
[0127] (1) CDR-H1 as depicted in SEQ ID NO: 1, CDR-H2 as depicted in SEQ ID NO: 2, CDR-H3 as depicted in SEQ ID NO: 3, CDR-L1 as depicted in SEQ ID NO: 4, CDR-L2 as depicted in SEQ ID NO: 5 and CDR-L3 as depicted in SEQ ID NO: 6;
[0128] (2) CDR-H1 as depicted in SEQ ID NO: 11, CDR-H2 as depicted in SEQ ID NO: 12, CDR-H3 as depicted in SEQ ID NO: 13, CDR-L1 as depicted in SEQ ID NO: 14, CDR-L2 as depicted in SEQ ID NO: 15 and CDR-L3 as depicted in SEQ ID NO: 16;
[0129] (3) CDR-H1 as depicted in SEQ ID NO: 21, CDR-H2 as depicted in SEQ ID NO: 22, CDR-H3 as depicted in SEQ ID NO: 23, CDR-L1 as depicted in SEQ ID NO: 24, CDR-L2 as depicted in SEQ ID NO: 25 and CDR-L3 as depicted in SEQ ID NO: 26;
[0130] (4) CDR-H1 as depicted in SEQ ID NO: 31, CDR-H2 as depicted in SEQ ID NO: 32, CDR-H3 as depicted in SEQ ID NO: 33, CDR-L1 as depicted in SEQ ID NO: 34, CDR-L2 as depicted in SEQ ID NO: 35 and CDR-L3 as depicted in SEQ ID NO: 36;
[0131] (5) CDR-H1 as depicted in SEQ ID NO: 41, CDR-H2 as depicted in SEQ ID NO: 42, CDR-H3 as depicted in SEQ ID NO: 43, CDR-L1 as depicted in SEQ ID NO: 44, CDR-L2 as depicted in SEQ ID NO: 45 and CDR-L3 as depicted in SEQ ID NO: 46;
[0132] (6) CDR-H1 as depicted in SEQ ID NO: 51, CDR-H2 as depicted in SEQ ID NO: 52, CDR-H3 as depicted in SEQ ID NO: 53, CDR-L1 as depicted in SEQ ID NO: 54, CDR-L2 as depicted in SEQ ID NO: 55 and CDR-L3 as depicted in SEQ ID NO: 56;
[0133] (7) CDR-H1 as depicted in SEQ ID NO: 61, CDR-H2 as depicted in SEQ ID NO: 62, CDR-H3 as depicted in SEQ ID NO: 63, CDR-L1 as depicted in SEQ ID NO: 64, CDR-L2 as depicted in SEQ ID NO: 65 and CDR-L3 as depicted in SEQ ID NO: 66;
[0134] (8) CDR-H1 as depicted in SEQ ID NO: 71, CDR-H2 as depicted in SEQ ID NO: 72, CDR-H3 as depicted in SEQ ID NO: 73, CDR-L1 as depicted in SEQ ID NO: 74, CDR-L2 as depicted in SEQ ID NO: 75 and CDR-L3 as depicted in SEQ ID NO: 76;
[0135] (9) CDR-H1 as depicted in SEQ ID NO: 161, CDR-H2 as depicted in SEQ ID NO: 162, CDR-H3 as depicted in SEQ ID NO: 163, CDR-L1 as depicted in SEQ ID NO: 164, CDR-L2 as depicted in SEQ ID NO: 165 and CDR-L3 as depicted in SEQ ID NO: 166;
[0136] (10) CDR-H1 as depicted in SEQ ID NO: 171, CDR-H2 as depicted in SEQ ID NO: 172, CDR-H3 as depicted in SEQ ID NO: 173, CDR-L1 as depicted in SEQ ID NO: 174, CDR-L2 as depicted in SEQ ID NO: 175 and CDR-L3 as depicted in SEQ ID NO: 176;
[0137] (11) CDR-H1 as depicted in SEQ ID NO: 181, CDR-H2 as depicted in SEQ ID NO: 182, CDR-H3 as depicted in SEQ ID NO: 183, CDR-L1 as depicted in SEQ ID NO: 184, CDR-L2 as depicted in SEQ ID NO: 185 and CDR-L3 as depicted in SEQ ID NO: 186;
[0138] (12) CDR-H1 as depicted in SEQ ID NO: 191, CDR-H2 as depicted in SEQ ID NO: 192, CDR-H3 as depicted in SEQ ID NO: 193, CDR-L1 as depicted in SEQ ID NO: 194, CDR-L2 as depicted in SEQ ID NO: 195 and CDR-L3 as depicted in SEQ ID NO: 196;
[0139] (13) CDR-H1 as depicted in SEQ ID NO: 201, CDR-H2 as depicted in SEQ ID NO: 202, CDR-H3 as depicted in SEQ ID NO: 203, CDR-L1 as depicted in SEQ ID NO: 204, CDR-L2 as depicted in SEQ ID NO: 205 and CDR-L3 as depicted in SEQ ID NO: 206;
[0140] (14) CDR-H1 as depicted in SEQ ID NO: 211, CDR-H2 as depicted in SEQ ID NO: 212, CDR-H3 as depicted in SEQ ID NO: 213, CDR-L1 as depicted in SEQ ID NO:214, CDR-L2 as depicted in SEQ ID NO: 215 and CDR-L3 as depicted in SEQ ID NO: 216;
[0141] (15) CDR-H1 as depicted in SEQ ID NO: 221, CDR-H2 as depicted in SEQ ID NO: 222, CDR-H3 as depicted in SEQ ID NO: 223, CDR-L1 as depicted in SEQ ID NO: 224, CDR-L2 as depicted in SEQ ID NO: 225 and CDR-L3 as depicted in SEQ ID NO: 226;
[0142] (16) CDR-H1 as depicted in SEQ ID NO: 311, CDR-H2 as depicted in SEQ ID NO: 312, CDR-H3 as depicted in SEQ ID NO: 313, CDR-L1 as depicted in SEQ ID NO: 314, CDR-L2 as depicted in SEQ ID NO: 315 and CDR-L3 as depicted in SEQ ID NO: 316;
[0143] (17) CDR-H1 as depicted in SEQ ID NO: 321, CDR-H2 as depicted in SEQ ID NO: 322, CDR-H3 as depicted in SEQ ID NO: 323, CDR-L1 as depicted in SEQ ID NO: 324, CDR-L2 as depicted in SEQ ID NO: 325 and CDR-L3 as depicted in SEQ ID NO: 326;
[0144] (18) CDR-H1 as depicted in SEQ ID NO: 331, CDR-H2 as depicted in SEQ ID NO: 332, CDR-H3 as depicted in SEQ ID NO: 333, CDR-L1 as depicted in SEQ ID NO: 334, CDR-L2 as depicted in SEQ ID NO: 335 and CDR-L3 as depicted in SEQ ID NO: 336;
[0145] (19) CDR-H1 as depicted in SEQ ID NO: 341, CDR-H2 as depicted in SEQ ID NO: 342, CDR-H3 as depicted in SEQ ID NO: 343, CDR-L1 as depicted in SEQ ID NO: 344, CDR-L2 as depicted in SEQ ID NO: 345 and CDR-L3 as depicted in SEQ ID NO: 346;
[0146] (20) CDR-H1 as depicted in SEQ ID NO: 351, CDR-H2 as depicted in SEQ ID NO: 352, CDR-H3 as depicted in SEQ ID NO: 353, CDR-L1 as depicted in SEQ ID NO: 354, CDR-L2 as depicted in SEQ ID NO: 355 and CDR-L3 as depicted in SEQ ID NO: 356;
[0147] (21) CDR-H1 as depicted in SEQ ID NO: 361, CDR-H2 as depicted in SEQ ID NO: 362, CDR-H3 as depicted in SEQ ID NO: 363, CDR-L1 as depicted in SEQ ID NO: 364, CDR-L2 as depicted in SEQ ID NO: 365 and CDR-L3 as depicted in SEQ ID NO: 366;
[0148] (22) CDR-H1 as depicted in SEQ ID NO: 371, CDR-H2 as depicted in SEQ ID NO: 372, CDR-H3 as depicted in SEQ ID NO: 373, CDR-L1 as depicted in SEQ ID NO: 374, CDR-L2 as depicted in SEQ ID NO: 375 and CDR-L3 as depicted in SEQ ID NO: 376;
[0149] (23) CDR-H1 as depicted in SEQ ID NO: 381, CDR-H2 as depicted in SEQ ID NO: 382, CDR-H3 as depicted in SEQ ID NO: 383, CDR-L1 as depicted in SEQ ID NO: 384, CDR-L2 as depicted in SEQ ID NO: 385 and CDR-L3 as depicted in SEQ ID NO: 386;
[0150] (24) CDR-H1 as depicted in SEQ ID NO: 581, CDR-H2 as depicted in SEQ ID NO: 582, CDR-H3 as depicted in SEQ ID NO: 583, CDR-L1 as depicted in SEQ ID NO: 584, CDR-L2 as depicted in SEQ ID NO: 585 and CDR-L3 as depicted in SEQ ID NO: 586;
[0151] (25) CDR-H1 as depicted in SEQ ID NO: 591, CDR-H2 as depicted in SEQ ID NO: 592, CDR-H3 as depicted in SEQ ID NO: 593, CDR-L1 as depicted in SEQ ID NO: 594, CDR-L2 as depicted in SEQ ID NO: 595 and CDR-L3 as depicted in SEQ ID NO: 596;
[0152] (26) CDR-H1 as depicted in SEQ ID NO: 601, CDR-H2 as depicted in SEQ ID NO: 602, CDR-H3 as depicted in SEQ ID NO: 603, CDR-L1 as depicted in SEQ ID NO: 604, CDR-L2 as depicted in SEQ ID NO: 605 and CDR-L3 as depicted in SEQ ID NO: 606;
[0153] (27) CDR-H1 as depicted in SEQ ID NO: 611, CDR-H2 as depicted in SEQ ID NO: 612, CDR-H3 as depicted in SEQ ID NO: 613, CDR-L1 as depicted in SEQ ID NO: 614, CDR-L2 as depicted in SEQ ID NO: 615 and CDR-L3 as depicted in SEQ ID NO: 616;
[0154] (28) CDR-H1 as depicted in SEQ ID NO: 621, CDR-H2 as depicted in SEQ ID NO: 622, CDR-H3 as depicted in SEQ ID NO: 623, CDR-L1 as depicted in SEQ ID NO: 624, CDR-L2 as depicted in SEQ ID NO: 625 and CDR-L3 as depicted in SEQ ID NO: 626;
[0155] (29) CDR-H1 as depicted in SEQ ID NO: 631, CDR-H2 as depicted in SEQ ID NO: 632, CDR-H3 as depicted in SEQ ID NO: 633, CDR-L1 as depicted in SEQ ID NO: 634, CDR-L2 as depicted in SEQ ID NO: 635 and CDR-L3 as depicted in SEQ ID NO: 636;
[0156] (30) CDR-H1 as depicted in SEQ ID NO: 641, CDR-H2 as depicted in SEQ ID NO: 642, CDR-H3 as depicted in SEQ ID NO: 643, CDR-L1 as depicted in SEQ ID NO: 644, CDR-L2 as depicted in SEQ ID NO: 645 and CDR-L3 as depicted in SEQ ID NO: 646;
[0157] (31) CDR-H1 as depicted in SEQ ID NO: 651, CDR-H2 as depicted in SEQ ID NO: 652, CDR-H3 as depicted in SEQ ID NO: 653, CDR-L1 as depicted in SEQ ID NO: 654, CDR-L2 as depicted in SEQ ID NO: 655 and CDR-L3 as depicted in SEQ ID NO: 656;
[0158] (32) CDR-H1 as depicted in SEQ ID NO: 661, CDR-H2 as depicted in SEQ ID NO: 662, CDR-H3 as depicted in SEQ ID NO: 663, CDR-L1 as depicted in SEQ ID NO: 664, CDR-L2 as depicted in SEQ ID NO: 665 and CDR-L3 as depicted in SEQ ID NO: 666;
[0159] (33) CDR-H1 as depicted in SEQ ID NO: 671, CDR-H2 as depicted in SEQ ID NO: 672, CDR-H3 as depicted in SEQ ID NO: 673, CDR-L1 as depicted in SEQ ID NO: 674, CDR-L2 as depicted in SEQ ID NO: 675 and CDR-L3 as depicted in SEQ ID NO: 676;
[0160] (34) CDR-H1 as depicted in SEQ ID NO: 681, CDR-H2 as depicted in SEQ ID NO: 682, CDR-H3 as depicted in SEQ ID NO: 683, CDR-L1 as depicted in SEQ ID NO: 684, CDR-L2 as depicted in SEQ ID NO: 685 and CDR-L3 as depicted in SEQ ID NO: 686;
[0161] (35) CDR-H1 as depicted in SEQ ID NO: 691, CDR-H2 as depicted in SEQ ID NO: 692, CDR-H3 as depicted in SEQ ID NO: 693, CDR-L1 as depicted in SEQ ID NO: 694, CDR-L2 as depicted in SEQ ID NO: 695 and CDR-L3 as depicted in SEQ ID NO: 696;
[0162] (36) CDR-H1 as depicted in SEQ ID NO: 701, CDR-H2 as depicted in SEQ ID NO: 702, CDR-H3 as depicted in SEQ ID NO: 703, CDR-L1 as depicted in SEQ ID NO: 704, CDR-L2 as depicted in SEQ ID NO: 705 and CDR-L3 as depicted in SEQ ID NO: 706;
[0163] (37) CDR-H1 as depicted in SEQ ID NO: 711, CDR-H2 as depicted in SEQ ID NO: 712, CDR-H3 as depicted in SEQ ID NO: 713, CDR-L1 as depicted in SEQ ID NO: 714, CDR-L2 as depicted in SEQ ID NO: 715 and CDR-L3 as depicted in SEQ ID NO: 716;
[0164] (38) CDR-H1 as depicted in SEQ ID NO: 721, CDR-H2 as depicted in SEQ ID NO: 722, CDR-H3 as depicted in SEQ ID NO: 723, CDR-L1 as depicted in SEQ ID NO: 724, CDR-L2 as depicted in SEQ ID NO: 725 and CDR-L3 as depicted in SEQ ID NO: 726;
[0165] (39) CDR-H1 as depicted in SEQ ID NO: 731, CDR-H2 as depicted in SEQ ID NO: 732, CDR-H3 as depicted in SEQ ID NO: 733, CDR-L1 as depicted in SEQ ID NO: 734, CDR-L2 as depicted in SEQ ID NO: 735 and CDR-L3 as depicted in SEQ ID NO: 736;
[0166] (40) CDR-H1 as depicted in SEQ ID NO: 741, CDR-H2 as depicted in SEQ ID NO: 742, CDR-H3 as depicted in SEQ ID NO: 743, CDR-L1 as depicted in SEQ ID NO: 744, CDR-L2 as depicted in SEQ ID NO: 745 and CDR-L3 as depicted in SEQ ID NO: 746;
[0167] (41) CDR-H1 as depicted in SEQ ID NO: 751, CDR-H2 as depicted in SEQ ID NO: 752, CDR-H3 as depicted in SEQ ID NO: 753, CDR-L1 as depicted in SEQ ID NO: 754, CDR-L2 as depicted in SEQ ID NO: 755 and CDR-L3 as depicted in SEQ ID NO: 756;
[0168] (42) CDR-H1 as depicted in SEQ ID NO: 761, CDR-H2 as depicted in SEQ ID NO: 762, CDR-H3 as depicted in SEQ ID NO: 763, CDR-L1 as depicted in SEQ ID NO: 764, CDR-L2 as depicted in SEQ ID NO: 765 and CDR-L3 as depicted in SEQ ID NO: 766;
[0169] (43) CDR-H1 as depicted in SEQ ID NO: 771, CDR-H2 as depicted in SEQ ID NO: 772, CDR-H3 as depicted in SEQ ID NO: 773, CDR-L1 as depicted in SEQ ID NO: 774, CDR-L2 as depicted in SEQ ID NO: 775 and CDR-L3 as depicted in SEQ ID NO: 776;
[0170] (44) CDR-H1 as depicted in SEQ ID NO: 781, CDR-H2 as depicted in SEQ ID NO: 782, CDR-H3 as depicted in SEQ ID NO: 783, CDR-L1 as depicted in SEQ ID NO: 784, CDR-L2 as depicted in SEQ ID NO: 785 and CDR-L3 as depicted in SEQ ID NO: 786;
[0171] (45) CDR-H1 as depicted in SEQ ID NO: 791, CDR-H2 as depicted in SEQ ID NO: 792, CDR-H3 as depicted in SEQ ID NO: 793, CDR-L1 as depicted in SEQ ID NO: 794, CDR-L2 as depicted in SEQ ID NO: 795 and CDR-L3 as depicted in SEQ ID NO: 796;
[0172] (46) CDR-H1 as depicted in SEQ ID NO: 801, CDR-H2 as depicted in SEQ ID NO: 802, CDR-H3 as depicted in SEQ ID NO: 803, CDR-L1 as depicted in SEQ ID NO: 804, CDR-L2 as depicted in SEQ ID NO: 805 and CDR-L3 as depicted in SEQ ID NO: 806;
[0173] (47) CDR-H1 as depicted in SEQ ID NO: 811, CDR-H2 as depicted in SEQ ID NO: 812, CDR-H3 as depicted in SEQ ID NO: 813, CDR-L1 as depicted in SEQ ID NO: 814, CDR-L2 as depicted in SEQ ID NO: 815 and CDR-L3 as depicted in SEQ ID NO: 816;
[0174] (48) CDR-H1 as depicted in SEQ ID NO: 821, CDR-H2 as depicted in SEQ ID NO: 822, CDR-H3 as depicted in SEQ ID NO: 823, CDR-L1 as depicted in SEQ ID NO: 824, CDR-L2 as depicted in SEQ ID NO: 825 and CDR-L3 as depicted in SEQ ID NO: 826;
[0175] (49) CDR-H1 as depicted in SEQ ID NO: 831, CDR-H2 as depicted in SEQ ID NO: 832, CDR-H3 as depicted in SEQ ID NO: 833, CDR-L1 as depicted in SEQ ID NO: 834, CDR-L2 as depicted in SEQ ID NO: 835 and CDR-L3 as depicted in SEQ ID NO: 836;
[0176] (50) CDR-H1 as depicted in SEQ ID NO: 961, CDR-H2 as depicted in SEQ ID NO: 962, CDR-H3 as depicted in SEQ ID NO: 963, CDR-L1 as depicted in SEQ ID NO: 964, CDR-L2 as depicted in SEQ ID NO: 965 and CDR-L3 as depicted in SEQ ID NO: 966;
[0177] (51) CDR-H1 as depicted in SEQ ID NO: 971, CDR-H2 as depicted in SEQ ID NO: 972, CDR-H3 as depicted in SEQ ID NO: 973, CDR-L1 as depicted in SEQ ID NO: 974, CDR-L2 as depicted in SEQ ID NO: 975 and CDR-L3 as depicted in SEQ ID NO: 976;
[0178] (52) CDR-H1 as depicted in SEQ ID NO: 981, CDR-H2 as depicted in SEQ ID NO: 982, CDR-H3 as depicted in SEQ ID NO: 983, CDR-L1 as depicted in SEQ ID NO: 984, CDR-L2 as depicted in SEQ ID NO: 985 and CDR-L3 as depicted in SEQ ID NO: 986; and
[0179] (53) CDR-H1 as depicted in SEQ ID NO: 991, CDR-H2 as depicted in SEQ ID NO: 992, CDR-H3 as depicted in SEQ ID NO: 993, CDR-L1 as depicted in SEQ ID NO: 994, CDR-L2 as depicted in SEQ ID NO: 995 and CDR-L3 as depicted in SEQ ID NO: 996.

[0180] In yet another embodiment, the first binding domain of the binding molecule comprises a VH region selected from the group consisting of a VH region as depicted in SEQ ID NO: 7, SEQ ID NO: 17, SEQ ID NO: 27, SEQ ID NO: 37, SEQ ID NO: 47, SEQ ID NO: 57, SEQ ID NO: 67, SEQ ID NO: 77, SEQ ID NO: 167, SEQ ID NO: 177, SEQ ID NO: 187, SEQ ID NO: 197, SEQ ID NO: 207, SEQ ID NO: 217, SEQ ID NO: 227, SEQ ID NO: 317, SEQ ID NO: 327, SEQ ID NO: 337, SEQ ID NO: 347, SEQ ID NO: 357, SEQ ID NO: 367, SEQ ID NO: 377, SEQ ID NO: 387, SEQ ID NO: 587, SEQ ID NO: 597, SEQ ID NO: 607, SEQ ID NO: 617, SEQ ID NO: 627, SEQ ID NO: 637, SEQ ID NO: 647, SEQ ID NO: 657, SEQ ID NO: 667, SEQ ID NO: 677, SEQ ID NO: 687, SEQ ID NO: 697, SEQ ID NO: 707, SEQ ID NO: 717, SEQ ID NO: 727, SEQ ID NO: 737, SEQ ID NO: 747, SEQ ID NO: 757, SEQ ID NO: 767, SEQ ID NO: 777, SEQ ID NO: 787, SEQ ID NO: 797, SEQ ID NO: 807, SEQ ID NO: 817, SEQ ID NO: 827, SEQ ID NO: 837, SEQ ID NO: 967, SEQ ID NO: 977, SEQ ID NO: 987, and SEQ ID NO: 997.

[0181] In another embodiment, the first binding domain of the binding molecule comprises a VL region selected from the group consisting of a VL region as depicted in SEQ ID in SEQ ID NO: 8, SEQ ID NO: 18, SEQ ID NO: 28, SEQ ID NO: 38, SEQ ID NO: 48, SEQ ID NO: 58, SEQ ID NO: 68, SEQ ID NO: 78, SEQ ID NO: 168, SEQ ID NO: 178, SEQ ID NO: 188, SEQ ID NO: 198, SEQ ID NO: 208, SEQ ID NO: 218, SEQ ID NO: 228, SEQ ID NO: 318, SEQ ID NO: 328, SEQ ID NO: 338, SEQ ID NO: 348, SEQ ID NO: 358, SEQ ID NO: 368, SEQ ID NO: 378, SEQ ID NO: 388, SEQ ID NO: 588, SEQ ID NO: 598, SEQ ID NO: 608, SEQ ID NO: 618, SEQ ID NO: 628, SEQ ID NO: 638, SEQ ID NO: 648, SEQ ID NO: 658, SEQ ID NO: 668, SEQ ID NO: 678, SEQ ID NO: 688, SEQ ID NO: 698, SEQ ID NO: 708, SEQ ID NO: 718, SEQ ID NO: 728, SEQ ID NO: 738, SEQ ID NO: 748, SEQ ID NO: 758, SEQ ID NO: 768, SEQ ID NO: 778, SEQ ID NO: 788, SEQ ID NO: 798, SEQ ID NO: 808, SEQ ID NO: 818, SEQ ID NO: 828, SEQ ID NO: 838, SEQ ID NO: 968, SEQ ID NO: 978, SEQ ID NO: 988, and SEQ ID NO: 998.

[0182] In one embodiment, the first binding domain of the binding molecule comprises a VH region and a VL region selected from the group consisting of:
[0183] (1) a VH region as depicted in SEQ ID NO: 7, and a VL region as depicted in SEQ ID NO: 8;
[0184] (2) a VH region as depicted in SEQ ID NO: 17, and a VL region as depicted in SEQ ID NO: 18;
[0185] (3) a VH region as depicted in SEQ ID NO: 27, and a VL region as depicted in SEQ ID NO: 28;
[0186] (4) a VH region as depicted in SEQ ID NO: 37, and a VL region as depicted in SEQ ID NO: 38;
[0187] (5) a VH region as depicted in SEQ ID NO: 47, and a VL region as depicted in SEQ ID NO: 48;
[0188] (6) a VH region as depicted in SEQ ID NO: 57, and a VL region as depicted in SEQ ID NO: 58;
[0189] (7) a VH region as depicted in SEQ ID NO: 67, and a VL region as depicted in SEQ ID NO: 68;
[0190] (8) a VH region as depicted in SEQ ID NO: 77, and a VL region as depicted in SEQ ID NO: 78;
[0191] (9) a VH region as depicted in SEQ ID NO: 167, and a VL region as depicted in SEQ ID NO: 168;
[0192] (10) a VH region as depicted in SEQ ID NO: 177, and a VL region as depicted in SEQ ID NO: 178;
[0193] (11) a VH region as depicted in SEQ ID NO: 187, and a VL region as depicted in SEQ ID NO: 188;
[0194] (12) a VH region as depicted in SEQ ID NO: 197, and a VL region as depicted in SEQ ID NO: 198;
[0195] (13) a VH region as depicted in SEQ ID NO: 207, and a VL region as depicted in SEQ ID NO: 208;
[0196] (14) a VH region as depicted in SEQ ID NO: 217, and a VL region as depicted in SEQ ID NO: 218;
[0197] (15) a VH region as depicted in SEQ ID NO: 227, and a VL region as depicted in SEQ ID NO: 228;
[0198] (16) a VH region as depicted in SEQ ID NO: 317, and a VL region as depicted in SEQ ID NO: 318;
[0199] (17) a VH region as depicted in SEQ ID NO: 327, and a VL region as depicted in SEQ ID NO: 328;
[0200] (18) a VH region as depicted in SEQ ID NO: 337, and a VL region as depicted in SEQ ID NO: 338;
[0201] (19) a VH region as depicted in SEQ ID NO: 347, and a VL region as depicted in SEQ ID NO: 348;
[0202] (20) a VH region as depicted in SEQ ID NO: 357, and a VL region as depicted in SEQ ID NO: 358;
[0203] (21) a VH region as depicted in SEQ ID NO: 367, and a VL region as depicted in SEQ ID NO: 368;
[0204] (22) a VH region as depicted in SEQ ID NO: 377, and a VL region as depicted in SEQ ID NO: 378;
[0205] (23) a VH region as depicted in SEQ ID NO: 387, and a VL region as depicted in SEQ ID NO: 388;
[0206] (24) a VH region as depicted in SEQ ID NO: 587, and a VL region as depicted in SEQ ID NO: 588;
[0207] (25) a VH region as depicted in SEQ ID NO: 597, and a VL region as depicted in SEQ ID NO: 598;
[0208] (26) a VH region as depicted in SEQ ID NO: 607, and a VL region as depicted in SEQ ID NO: 608;
[0209] (27) a VH region as depicted in SEQ ID NO: 617, and a VL region as depicted in SEQ ID NO: 618;
[0210] (28) a VH region as depicted in SEQ ID NO: 627, and a VL region as depicted in SEQ ID NO: 628;
[0211] (29) a VH region as depicted in SEQ ID NO: 637, and a VL region as depicted in SEQ ID NO: 638;
[0212] (30) a VH region as depicted in SEQ ID NO: 647, and a VL region as depicted in SEQ ID NO: 648;
[0213] (31) a VH region as depicted in SEQ ID NO: 657, and a VL region as depicted in SEQ ID NO: 658;
[0214] (32) a VH region as depicted in SEQ ID NO: 667, and a VL region as depicted in SEQ ID NO: 668;
[0215] (33) a VH region as depicted in SEQ ID NO: 677, and a VL region as depicted in SEQ ID NO: 678;
[0216] (34) a VH region as depicted in SEQ ID NO: 687, and a VL region as depicted in SEQ ID NO: 688;
[0217] (35) a VH region as depicted in SEQ ID NO: 697, and a VL region as depicted in SEQ ID NO: 698;
[0218] (36) a VH region as depicted in SEQ ID NO: 707, and a VL region as depicted in SEQ ID NO: 708;
[0219] (37) a VH region as depicted in SEQ ID NO: 717, and a VL region as depicted in SEQ ID NO: 718;
[0220] (38) a VH region as depicted in SEQ ID NO: 727, and a VL region as depicted in SEQ ID NO: 728;
[0221] (39) a VH region as depicted in SEQ ID NO: 737, and a VL region as depicted in SEQ ID NO: 738;
[0222] (40) a VH region as depicted in SEQ ID NO: 747, and a VL region as depicted in SEQ ID NO: 748;
[0223] (41) a VH region as depicted in SEQ ID NO: 757, and a VL region as depicted in SEQ ID NO: 758;
[0224] (42) a VH region as depicted in SEQ ID NO: 767, and a VL region as depicted in SEQ ID NO: 768;
[0225] (43) a VH region as depicted in SEQ ID NO: 777, and a VL region as depicted in SEQ ID NO: 778;
[0226] (44) a VH region as depicted in SEQ ID NO: 787, and a VL region as depicted in SEQ ID NO: 788;
[0227] (45) a VH region as depicted in SEQ ID NO: 797, and a VL region as depicted in SEQ ID NO: 798;
[0228] (46) a VH region as depicted in SEQ ID NO: 807, and a VL region as depicted in SEQ ID NO: 808;
[0229] (47) a VH region as depicted in SEQ ID NO: 817, and a VL region as depicted in SEQ ID NO: 818;
[0230] (48) a VH region as depicted in SEQ ID NO: 827, and a VL region as depicted in SEQ ID NO: 828;
[0231] (49) a VH region as depicted in SEQ ID NO: 837, and a VL region as depicted in SEQ ID NO: 838;
[0232] (50) a VH region as depicted in SEQ ID NO: 967, and a VL region as depicted in SEQ ID NO: 968;
[0233] (51) a VH region as depicted in SEQ ID NO: 977, and a VL region as depicted in SEQ ID NO: 978;
[0234] (52) a VH region as depicted in SEQ ID NO: 987, and a VL region as depicted in SEQ ID NO: 988; and
[0235] (53) a VH region as depicted in SEQ ID NO: 997, and a VL region as depicted in SEQ ID NO: 998.

[0236] In one example, the first binding domain comprises an amino acid sequence selected from the group consisting of SEQ ID NO: 9, SEQ ID NO: 19, SEQ ID NO: 29, SEQ ID NO: 39, SEQ ID NO: 49, SEQ ID NO: 59, SEQ ID NO: 69, SEQ ID NO: 79, SEQ ID NO: 169, SEQ ID NO: 179, SEQ ID NO: 189, SEQ ID NO: 199, SEQ ID NO: 209, SEQ ID NO: 219, SEQ ID NO: 229, SEQ ID NO: 319, SEQ ID NO: 329, SEQ ID NO: 339, SEQ ID NO: 349, SEQ ID NO: 359, SEQ ID NO: 369, SEQ ID NO: 379, SEQ ID NO: 389, SEQ ID NO: 589, SEQ ID NO: 599, SEQ ID NO: 609, SEQ ID NO: 619, SEQ ID NO: 629, SEQ ID NO: 639, SEQ ID NO: 649, SEQ ID NO: 659, SEQ ID NO: 669, SEQ ID NO: 679, SEQ ID NO: 689, SEQ ID NO: 699, SEQ ID NO: 709, SEQ ID NO: 719, SEQ ID NO: 729, SEQ ID NO: 739, SEQ ID NO: 749, SEQ ID NO: 759, SEQ ID NO: 769, SEQ ID NO: 779, SEQ ID NO: 789, SEQ ID NO: 799, SEQ ID NO: 809, SEQ ID NO: 819, SEQ ID NO: 829, SEQ ID NO: 839, SEQ ID NO: 969, SEQ ID NO: 979, SEQ ID NO: 989, and SEQ ID NO: 999.

[0237] It is preferred that a binding molecule of the present invention has a CDR-H3 region of 12 amino acids in length, wherein a tyrosine (Y) residue is present at position 3, 4 and 12. A preferred CDR-H3 is shown in SEQ ID NOs: 43, 193, 333, 613, 703, 733, 823, or 973. Accordingly, a binding molecule of the present invention has in a preferred embodiment a CDR-H3 shown in of SEQ ID NOs: 43, 193, 333, 613, 703, 733, 823, or 973.

[0238] Preferred is a binding molecule having the amino acid sequence shown in SEQ ID NO:340. Also preferred is a binding molecule having the amino acid sequence shown in or SEQ ID NO: 980. The binding molecule of the present invention is preferably an “isolated” binding molecule. “Isolated” when used to describe the binding molecule disclosed herein, means a binding molecule that has been identified, separated and/or recovered from a component of its production environment. Preferably, the isolated binding molecule is free of association with all other components from its production environment. Contaminant components of its production environment, such as that resulting from recombinant transfected cells, are materials that would typically interfere with diagnostic or therapeutic uses for the polypeptide, and may include enzymes, hormones, and other proteinaceous or non-proteinaceous solutes. In preferred embodiments, the binding molecule will be purified (1) to a degree sufficient to obtain at least 15 residues of N-terminal or internal amino acid sequence by use of a spinning cup sequenator, or (2) to homogeneity by SDS-PAGE under non-reducing or reducing conditions using Coomassie blue or, preferably, silver stain. Ordinarily, however, an isolated antibody will be prepared by at least one purification step.

[0239] Amino acid sequence modifications of the binding molecules described herein are contemplated. For example, it may be desirable to improve the binding affinity and/or other biological properties of the antibody. Amino acid sequence variants of the binding molecules are prepared by introducing appropriate nucleotide changes into the binding molecules nucleic acid, or by peptide synthesis.

[0240] Such modifications include, for example, deletions from, and/or insertions into, and/or substitutions of, residues within the amino acid sequences of the binding molecules. Any combination of deletion, insertion, and substitution is made to arrive at the final construct, provided that the final construct possesses the desired characteristics. The amino acid changes also may alter post-translational processes of the binding molecules, such as changing the number or position of glycosylation sites. Preferably, 1, 2, 3, 4, 5, 6, 7, 8, 9, or 10 amino acids may be substituted in a CDR, while 1, 2, 3, 4, 5, 6, 7, 8, 9, 10, 11, 12, 13, 14, 15, 16, 17, 18, 19, 20, or 25 amino acids may be substituted in the framework regions (FRs). The substitutions are preferably conservative substitutions as described herein. Additionally or alternatively, 1, 2, 3, 4, 5, or 6 amino acids may be inserted or deleted in each of the CDRs (of course, dependent on their length), while 1, 2, 3, 4, 5, 6, 7, 8, 9, 10, 11, 12, 13, 14, 15, 16, 17, 18, 19, 20, or 25 amino acids may be inserted or deleted in each of the FRs.

[0241] A useful method for identification of certain residues or regions of the binding molecules that are preferred locations for mutagenesis is called “alanine scanning mutagenesis” as described by Cunningham and Wells in Science, 244: 1081-1085 (1989). Here, a residue or group of target residues within the binding molecule is/are identified (e.g. charged residues such as arg, asp, his, lys, and glu) and replaced by a neutral or negatively charged amino acid (most preferably alanine or polyalanine) to affect the interaction of the amino acids with the epitope.

[0242] Those amino acid locations demonstrating functional sensitivity to the substitutions then are refined by introducing further or other variants at, or for, the sites of substitution. Thus, while the site for introducing an amino acid sequence variation is predetermined, the nature of the mutation per se needs not to be predetermined. For example, to analyze the performance of a mutation at a given site, ala scanning or random mutagenesis is conducted at a target codon or region and the expressed binding molecule variants are screened for the desired activity.

[0243] Preferably, amino acid sequence insertions include amino- and/or carboxyl-terminal fusions ranging in length from 1, 2, 3, 4, 5, 6, 7, 8, 9 or 10 residues to polypeptides containing a hundred or more residues, as well as intrasequence insertions of single or multiple amino acid residues. An insertional variant of the binding molecule includes the fusion to the N- or C-terminus of the antibody to an enzyme or a fusion to a polypeptide which increases the serum half-life of the antibody.

[0244] Another type of variant is an amino acid substitution variant. These variants have preferably at least 1, 2, 3, 4, 5, 6, 7, 8, 9 or 10 amino acid residues in the binding molecule replaced by a different residue. The sites of greatest interest for substitutional mutagenesis include the CDRs of the heavy and/or light chain, in particular the hypervariable regions, but FR alterations in the heavy and/or light chain are also contemplated.

[0245] For example, if a CDR sequence encompasses 6 amino acids, it is envisaged that one, two or three of these amino acids are substituted. Similarly, if a CDR sequence encompasses 15 amino acids it is envisaged that one, two, three, four, five or six of these amino acids are substituted.

[0246] Generally, if amino acids are substituted in one or more or all of the CDRs of the heavy and/or light chain, it is preferred that the then-obtained “substituted” sequence is at least 60%, more preferably 65%, even more preferably 70%, particularly preferably 75%, more particularly preferably 80% identical to the “original” CDR sequence. This means that it is dependent of the length of the CDR to which degree it is identical to the “substituted” sequence. For example, a CDR having 5 amino acids is preferably 80% identical to its substituted sequence in order to have at least one amino acid substituted. Accordingly, the CDRs of the binding molecule may have different degrees of identity to their substituted sequences, e.g., CDRL1 may have 80%, while CDRL3 may have 90%.

[0247] Preferred substitutions (or replacements) are conservative substitutions. However, any substitution (including non-conservative substitution or one or more from the “exemplary substitutions” listed in Table 1, below) is envisaged as long as the binding molecule retains its capability to bind to BCMA via the first binding domain and to CD3 epsilon via the second binding domain and/or its CDRs have an identity to the then substituted sequence (at least 60%, more preferably 65%, even more preferably 70%, particularly preferably 75%, more particularly preferably 80% identical to the “original” CDR sequence).

[0248] Conservative substitutions are shown in Table 1 under the heading of “preferred substitutions”. If such substitutions result in a change in biological activity, then more substantial changes, denominated “exemplary substitutions” in Table 1, or as further described below in reference to amino acid classes, may be introduced and the products screened for a desired characteristic.

TABLE 1
Amino Acid Substitutions

| Original | Exemplary Substitutions | Preferred Substitutions |
|---|---|---|
| Ala (A) | val, leu, ile | val |
| Arg (R) | lys, gln, asn | lys |
| Asn (N) | gln, his, asp, lys, arg | gln |
| Asp (D) | glu, asn | glu |
| Cys (C) | ser, ala | ser |
| Gln (Q) | asn, glu | asn |
| Glu (E) | asp, gln | asp |
| Gly (G) | ala | ala |
| His (H) | asn, gln, lys, arg | arg |
| Ile (I) | leu, val, met, ala, phe | leu |
| Leu (L) | norleucine, ile, val, met, ala | ile |
| Lys (K) | arg, gln, asn | arg |
| Met (M) | leu, phe, ile | leu |
| Phe (F) | leu, val, ile, ala, tyr | tyr |
| Pro (P) | ala | ala |
| Ser (S) | thr | thr |
| Thr (T) | ser | ser |
| Trp (W) | tyr, phe | tyr |
| Tyr (Y) | trp, phe, thr, ser | phe |
| Val (V) | ile, leu, met, phe, ala | leu |

[0249] Substantial modifications in the biological properties of the binding molecule of the present invention are accomplished by selecting substitutions that differ significantly in their effect on maintaining (a) the structure of the polypeptide backbone in the area of the substitution, for example, as a sheet or helical conformation, (b) the charge or hydrophobicity of the molecule at the target site, or (c) the bulk of the side chain. Naturally occurring residues are divided into groups based on common side-chain properties: (1) hydrophobic: norleucine, met, ala, val, leu, ile; (2) neutral hydrophilic: cys, ser, thr; (3) acidic: asp, glu; (4) basic: asn, gin, his, lys, arg; (5) residues that influence chain orientation: gly, pro; and (6) aromatic: trp, tyr, phe.

[0250] Non-conservative substitutions will entail exchanging a member of one of these classes for another class. Any cysteine residue not involved in maintaining the proper conformation of the binding molecule may be substituted, generally with serine, to improve the oxidative stability of the molecule and prevent aberrant crosslinking. Conversely, cysteine bond(s) may be added to the antibody to improve its stability (particularly where the antibody is an antibody fragment such as an Fv fragment).

[0251] A particularly preferred type of substitutional variant involves substituting one or more hypervariable region residues of a parent antibody (e.g. a humanized or human antibody). Generally, the resulting variant(s) selected for further development will have improved biological properties relative to the parent antibody from which they are generated. A convenient way for generating such substitutional variants involves affinity maturation using phage display. Briefly, several hypervariable region sites (e.g. 6-7 sites) are mutated to generate all possible amino acid substitutions at each site. The antibody variants thus generated are displayed in a monovalent fashion from filamentous phage particles as fusions to the gene III product of M13 packaged within each particle. The phage-displayed variants are then screened for their biological activity (e.g. binding affinity) as herein disclosed. In order to identify candidate hypervariable region sites for modification, alanine scanning mutagenesis can be performed to identify hypervariable region residues contributing significantly to antigen binding. Alternatively, or additionally, it may be beneficial to analyze a crystal structure of the antigen-antibody complex to identify contact points between the binding domain and, e.g., human BCMA. Such contact residues and neighbouring residues are candidates for substitution according to the techniques elaborated herein. Once such variants are generated, the panel of variants is subjected to screening as described herein and antibodies with superior properties in one or more relevant assays may be selected for further development.

[0252] Other modifications of the binding molecule are contemplated herein. For example, the binding molecule may be linked to one of a variety of non-proteinaceous polymers, e.g., polyethylene glycol, polypropylene glycol, polyoxyalkylenes, or copolymers of polyethylene glycol and polypropylene glycol. The binding molecule may also be entrapped in microcapsules prepared, for example, by coacervation techniques or by interfacial polymerization (for example, hydroxymethylcellulose or gelatine-microcapsules and poly (methylmethacylate) microcapsules, respectively), in colloidal drug delivery systems (for example, liposomes, albumin microspheres, microemulsions, nanoparticles and nanocapsules), or in macroemulsions. Such techniques are disclosed in Remington's Pharmaceutical Sciences, 16th edition, Oslo, A., Ed., (1980).

[0253] The binding molecules disclosed herein may also be formulated as immuno-liposomes. A “liposome” is a small vesicle composed of various types of lipids, phospholipids and/or surfactant which is useful for delivery of a drug to a mammal. The components of the liposome are commonly arranged in a bilayer formation, similar to the lipid arrangement of biological membranes. Liposomes containing the antibody are prepared by methods known in the art, such as described in Epstein et al., Proc. Natl. Acad. Sci. USA, 82: 3688 (1985); Hwang et al., Proc. Natl. Acad. Sci. USA, 77: 4030 (1980); U.S. Pat. Nos. 4,485,045 and 4,544,545; and WO 97/38731 published Oct. 23, 1997. Liposomes with enhanced circulation time are disclosed in U.S. Pat. No. 5,013,556. Particularly useful liposomes can be generated by the reverse phase evaporation method with a lipid composition comprising phosphatidylcholine, cholesterol and PEG-derivatized phosphatidylethanolamine (PEG-PE). Liposomes are extruded through filters of defined pore size to yield liposomes with the desired diameter. Fab′ fragments of the antibody of the present invention can be conjugated to the liposomes as described in Martin et al. J. Biol. Chem. 257: 286-288 (1982) via a disulfide interchange reaction. A chemotherapeutic agent is optionally contained within the liposome. See Gabizon et al. J. National Cancer Inst. 81 (19) 1484 (1989).

[0254] When using recombinant techniques, the binding molecule can be produced intracellularly, in the periplasmic space, or directly secreted into the medium. If the binding molecule is produced intracellularly, as a first step, the particulate debris, either host cells or lysed fragments, are removed, for example, by centrifugation or ultrafiltration. Carter et al., Bio/Technology 10: 163-167 (1992) describe a procedure for isolating antibodies which are secreted to the periplasmic space of E. coli.

[0255] The binding molecule composition prepared from the cells can be purified using, for example, hydroxylapatite chromatography, gel electrophoresis, dialysis, and affinity chromatography, with affinity chromatography being the preferred purification technique.

[0256] In a further aspect, the present invention relates to a nucleic acid sequence encoding a binding molecule of the invention. The term “nucleic acid” is well known to the skilled person and encompasses DNA (such as cDNA) and RNA (such as mRNA). The nucleic acid can be double stranded and single stranded, linear and circular. Said nucleic acid molecule is preferably comprised in a vector which is preferably comprised in a host cell. Said host cell is, e.g. after transformation or transfection with the nucleic acid sequence of the invention, capable of expressing the binding molecule. For that purpose the nucleic acid molecule is operatively linked with control sequences.

[0257] A vector is a nucleic acid molecule used as a vehicle to transfer (foreign) genetic material into a cell. The term “vector” encompasses—but is not restricted to—plasmids, viruses, cosmids and artificial chromosomes. In general, engineered vectors comprise an origin of replication, a multicloning site and a selectable marker. The vector itself is generally a nucleotide sequence, commonly aDNA sequence, that comprises an insert (transgene) and a larger sequence that serves as the “backbone” of the vector. Modern vectors may encompass additional features besides the transgene insert and a backbone: promoter, genetic marker, antibiotic resistance, reporter gene, targeting sequence, protein purification tag. Vectors called expression vectors (expression constructs) specifically are for the expression of the transgene in the target cell, and generally have control sequences such as a promoter sequence that drives expression of the transgene. Insertion of a vector into the target cell is usually called “transformation” for bacterial cells, “transfection” for eukaryotic cells, although insertion of a viral vector is also called “transduction”.

[0258] As used herein, the term “host cell” is intended to refer to a cell into which a nucleic acid encoding the binding molecule of the invention is introduced by way of transformation, transfection and the like. It should be understood that such terms refer not only to the particular subject cell but to the progeny or potential progeny of such a cell. Because certain modifications may occur in succeeding generations due to either mutation or environmental influences, such progeny may not, in fact, be identical to the parent cell, but are still included within the scope of the term as used herein.

[0259] As used herein, the term “expression” includes any step involved in the production of a binding molecule of the invention including, but not limited to, transcription, post-transcriptional modification, translation, post-translational modification, and secretion.

[0260] The term “control sequences” refers to DNA sequences necessary for the expression of an operably linked coding sequence in a particular host organism. The control sequences that are suitable for prokaryotes, for example, include a promoter, optionally an operator sequence, and a ribosome binding site. Eukaryotic cells are known to utilize promoters, polyadenylation signals, and enhancers.

[0261] A nucleic acid is “operably linked” when it is placed into a functional relationship with another nucleic acid sequence. For example, DNA for a presequence or secretory leader is operably linked to DNA for a polypeptide if it is expressed as a preprotein that participates in the secretion of the polypeptide; a promoter or enhancer is operably linked to a coding sequence if it affects the transcription of the sequence; or a ribosome binding site is operably linked to a coding sequence if it is positioned so as to facilitate translation. Generally, “operably linked” means that the DNA sequences being linked are contiguous, and, in the case of a secretory leader, contiguous and in reading phase. However, enhancers do not have to be contiguous. Linking is accomplished by ligation at convenient restriction sites. If such sites do not exist, the synthetic oligonucleotide adaptors or linkers are used in accordance with conventional practice.

[0262] The terms “host cell,” “target cell” or “recipient cell” are intended to include any individual cell or cell culture that can be or has/have been recipients for vectors or the incorporation of exogenous nucleic acid molecules, polynucleotides and/or proteins. It also is intended to include progeny of a single cell, and the progeny may not necessarily be completely identical (in morphology or in genomic or total DNA complement) to the original parent cell due to natural, accidental, or deliberate mutation. The cells may be prokaryotic or eukaryotic, and include but are not limited to bacterial cells, yeast cells, animal cells, and mammalian cells, e.g., murine, rat, macaque or human.

[0263] Suitable host cells include prokaryotes and eukaryotic host cells including yeasts, fungi, insect cells and mammalian cells.

[0264] The binding molecule of the invention can be produced in bacteria. After expression, the binding molecule of the invention, preferably the binding molecule is isolated from the E. coli cell paste in a soluble fraction and can be purified through, e.g., affinity chromatography and/or size exclusion. Final purification can be carried out similar to the process for purifying antibody expressed e.g, in CHO cells.

[0265] In addition to prokaryotes, eukaryotic microbes such as filamentous fungi or yeast are suitable cloning or expression hosts for the binding molecule of the invention. Saccharomyces cerevisiae, or common bakers yeast, is the most commonly used among lower eukaryotic host microorganisms. However, a number of other genera, species, and strains are commonly available and useful herein, such as Schizosaccharomyces pombe, Kluyveromyces hosts such as, e.g., K. lactis, K. fragilis (ATCC 12424), K. bulgaricus (ATCC 16045), K. wickeramii (ATCC 24178), K. waltii (ATCC 56500), K. drosophilarum (ATCC 36906), K. thermotolerans, and K. marxianus; yarrowia (EP 402 226); Pichia pastoris (EP 183 070); Candida; Trichoderma reesia (EP 244 234); Neurospora crassa; Schwanniomyces such as Schwanniomyces occidentalis; and filamentous fungi such as, e.g., Neurospora, Penicillium, Tolypocladium, and Aspergillus hosts such as A. nidulans and A. niger.

[0266] Suitable host cells for the expression of glycosylated binding molecule of the invention, preferably antibody derived binding molecules are derived from multicellular organisms. Examples of invertebrate cells include plant and insect cells. Numerous baculoviral strains and variants and corresponding permissive insect host cells from hosts such as Spodoptera frugiperda (caterpillar), Aedes aegypti (mosquito), Aedes albopictus (mosquito), Drosophila melanogaster (fruit fly), and Bombyx mori have been identified. A variety of viral strains for transfection are publicly available, e.g., the L-1 variant of Autographa californica NPV and the Bm-5 strain of Bombyx mori NPV, and such viruses may be used as the virus herein according to the present invention, particularly for transfection of Spodoptera frugiperda cells.

[0267] Plant cell cultures of cotton, corn, potato, soybean, petunia, tomato, Arabidopsis and tobacco can also be utilized as hosts. Cloning and expression vectors useful in the production of proteins in plant cell culture are known to those of skill in the art. See e.g. Hiatt et al., Nature (1989) 342: 76-78, Owen et al. (1992) Bio/Technology 10: 790-794, Artsaenko et al. (1995) The Plant J 8: 745-750, and Fecker et al. (1996) Plant Mol Biol 32: 979-986.

[0268] However, interest has been greatest in vertebrate cells, and propagation of vertebrate cells in culture (tissue culture) has become a routine procedure. Examples of useful mammalian host cell lines are monkey kidney CV1 line transformed by SV40 (COS-7, ATCC CRL 1651); human embryonic kidney line (293 or 293 cells subcloned for growth in suspension culture, Graham et al., J. Gen Virol. 36: 59 (1977)); baby hamster kidney cells (BHK, ATCC CCL 10); Chinese hamster ovary cells/-DHFR (CHO, Urlaub et al., Proc. Natl. Acad. Sci. USA 77: 4216 (1980)); mouse sertoli cells (TM4, Mather, Biol. Reprod. 23: 243-251 (1980)); monkey kidney cells (CVI ATCC CCL 70); African green monkey kidney cells (VERO-76, ATCC CRL1587); human cervical carcinoma cells (HELA, ATCC CCL 2); canine kidney cells (MDCK, ATCC CCL 34); buffalo rat liver cells (BRL 3A, ATCC CRL 1442); human lung cells (W138, ATCC CCL 75); human liver cells (Hep G2,1413 8065); mouse mammary tumor (MMT 060562, ATCC CCL5 1); TRI cells (Mather et al., Annals N.Y. Acad. Sci. 383: 44-68 (1982)); MRC 5 cells; FS4 cells; and a human hepatoma line (Hep G2).

[0269] When using recombinant techniques, the binding molecule of the invention can be produced intracellularly, in the periplasmic space, or directly secreted into the medium. If the binding molecule is produced intracellularly, as a first step, the particulate debris, either host cells or lysed fragments, are removed, for example, by centrifugation or ultrafiltration. Carter et al., Bio/Technology 10: 163-167 (1992) describe a procedure for isolating antibodies which are secreted to the periplasmic space of E. coli. Briefly, cell paste is thawed in the presence of sodium acetate (pH 3.5), EDTA, and phenylmethylsulfonylfluoride (PMSF) over about 30 min. Cell debris can be removed by centrifugation. Where the antibody is secreted into the medium, supernatants from such expression systems are generally first concentrated using a commercially available protein concentration filter, for example, an Amicon or Millipore Pellicon ultrafiltration unit. A protease inhibitor such as PMSF may be included in any of the foregoing steps to inhibit proteolysis and antibiotics may be included to prevent the growth of adventitious contaminants.

[0270] The binding molecule of the invention prepared from the host cells can be purified using, for example, hydroxylapatite chromatography, gel electrophoresis, dialysis, and affinity chromatography, with affinity chromatography being the preferred purification technique.

[0271] The matrix to which the affinity ligand is attached is most often agarose, but other matrices are available. Mechanically stable matrices such as controlled pore glass or poly (styrenedivinyl) benzene allow for faster flow rates and shorter processing times than can be achieved with agarose. Where the binding molecule of the invention comprises a CH3 domain, the Bakerbond ABXMresin (J. T. Baker, Phillipsburg, N.J.) is useful for purification. Other techniques for protein purification such as fractionation on an ion-exchange column, ethanol precipitation, Reverse Phase HPLC, chromatography on silica, chromatography on heparin SEPHAROSE™ chromatography on an anion or cation exchange resin (such as a polyaspartic acid column), chromato-focusing, SDS-PAGE, and ammonium sulfate precipitation are also available depending on the antibody to be recovered.

[0272] In another aspect, processes are provided for producing binding molecules of the invention, said processes comprising culturing a host cell defined herein under conditions allowing the expression of the binding molecule and recovering the produced binding molecule from the culture.

[0273] The term “culturing” refers to the in vitro maintenance, differentiation, growth, proliferation and/or propagation of cells under suitable conditions in a medium.

[0274] In an alternative embodiment, compositions are provided comprising a binding molecule of the invention, or produced according to the process of the invention. Preferably, said composition is a pharmaceutical composition.

[0275] As used herein, the term “pharmaceutical composition” relates to a composition for administration to a patient, preferably a human patient. The particular preferred pharmaceutical composition of this invention comprises the binding molecule of the invention. Preferably, the pharmaceutical composition comprises suitable formulations of carriers, stabilizers and/or excipients. In a preferred embodiment, the pharmaceutical composition comprises a composition for parenteral, transdermal, intraluminal, intraarterial, intrathecal and/or intranasal administration or by direct injection into tissue. It is in particular envisaged that said composition is administered to a patient via infusion or injection. Administration of the suitable compositions may be effected by different ways, e.g., by intravenous, intraperitoneal, subcutaneous, intramuscular, topical or intradermal administration. In particular, the present invention provides for an uninterrupted administration of the suitable composition. As a non-limiting example, uninterrupted, i.e. continuous administration may be realized by a small pump system worn by the patient for metering the influx of therapeutic agent into the body of the patient. The pharmaceutical composition comprising the binding molecule of the invention can be administered by using said pump systems. Such pump systems are generally known in the art, and commonly rely on periodic exchange of cartridges containing the therapeutic agent to be infused. When exchanging the cartridge in such a pump system, a temporary interruption of the otherwise uninterrupted flow of therapeutic agent into the body of the patient may ensue. In such a case, the phase of administration prior to cartridge replacement and the phase of administration following cartridge replacement would still be considered within the meaning of the pharmaceutical means and methods of the invention together make up one “uninterrupted administration” of such therapeutic agent.

[0276] The continuous or uninterrupted administration of these binding molecules of the invention may be intravenous or subcutaneous by way of a fluid delivery device or small pump system including a fluid driving mechanism for driving fluid out of a reservoir and an actuating mechanism for actuating the driving mechanism. Pump systems for subcutaneous administration may include a needle or a cannula for penetrating the skin of a patient and delivering the suitable composition into the patient's body. Said pump systems may be directly fixed or attached to the skin of the patient independently of a vein, artery or blood vessel, thereby allowing a direct contact between the pump system and the skin of the patient. The pump system can be attached to the skin of the patient for 24 hours up to several days. The pump system may be of small size with a reservoir for small volumes. As a non-limiting example, the volume of the reservoir for the suitable pharmaceutical composition to be administered can be between 0.1 and 50 ml.

[0277] The continuous administration may be transdermal by way of a patch worn on the skin and replaced at intervals. One of skill in the art is aware of patch systems for drug delivery suitable for this purpose. It is of note that transdermal administration is especially amenable to uninterrupted administration, as exchange of a first exhausted patch can advantageously be accomplished simultaneously with the placement of a new, second patch, for example on the surface of the skin immediately adjacent to the first exhausted patch and immediately prior to removal of the first exhausted patch. Issues of flow interruption or power cell failure do not arise.

[0278] The inventive compositions may further comprise a pharmaceutically acceptable carrier. Examples of suitable pharmaceutical carriers are well known in the art and include solutions, e.g. phosphate buffered saline solutions, water, emulsions, such as oil/water emulsions, various types of wetting agents, sterile solutions, liposomes, etc. Compositions comprising such carriers can be formulated by well known conventional methods. Formulations can comprise carbohydrates, buffer solutions, amino acids and/or surfactants. Carbohydrates may be non-reducing sugars, preferably trehalose, sucrose, octasulfate, sorbitol or xylitol. In general, as used herein, “pharmaceutically acceptable carrier” means any and all solvents, dispersion media, coatings, antibacterial and antifungal agents, isotonic and absorption delaying agents, compatible with pharmaceutical administration. The use of such media and agents for pharmaceutically active substances is well known in the art. Acceptable carriers, excipients, or stabilizers are nontoxic to recipients at the dosages and concentrations employed and include: additional buffering agents; preservatives; co-solvents; antioxidants, including ascorbic acid and methionine; chelating agents such as EDTA; metal complexes (e.g., Zn-protein complexes); biodegradable polymers, such as polyesters; salt-forming counter-ions, such as sodium, polyhydric sugar alcohols; amino acids, such as alanine, glycine, asparagine, 2-phenylalanine, and threonine; sugars or sugar alcohols, such as trehalose, sucrose, octasulfate, sorbitol or xylitol stachyose, mannose, sorbose, xylose, ribose, myoinisitose, galactose, lactitol, ribitol, myoinisitol, galactitol, glycerol, cyclitols (e.g., inositol), polyethylene glycol; sulfur containing reducing agents, such as glutathione, thioctic acid, sodium thioglycolate, thioglycerol, [alpha]-monothioglycerol, and sodium thio sulfate; low molecular weight proteins, such as human serum albumin, bovine serum albumin, gelatin, or other immunoglobulins; and hydrophilic polymers, such as polyvinylpyrrolidone. Such formulations may be used for continuous administrations which may be intravenuous or subcutaneous with and/or without pump systems. Amino acids may be charged amino acids, preferably lysine, lysine acetate, arginine, glutamate and/or histidine. Surfactants may be detergents, preferably with a molecular weight of >1.2 KD and/or a polyether, preferably with a molecular weight of >3 KD. Non-limiting examples for preferred detergents are Tween 20, Tween 40, Tween 60, Tween 80 or Tween 85. Non-limiting examples for preferred polyethers are PEG 3000, PEG 3350, PEG 4000 or PEG 5000. Buffer systems used in the present invention can have a preferred pH of 5-9 and may comprise citrate, succinate, phosphate, histidine and acetate.

[0279] The compositions of the present invention can be administered to the subject at a suitable dose which can be determined e.g. by dose escalating studies by administration of increasing doses of the polypeptide of the invention exhibiting cross-species specificity described herein to non-chimpanzee primates, for instance macaques. As set forth above, the binding molecule of the invention exhibiting cross-species specificity described herein can be advantageously used in identical form in preclinical testing in non-chimpanzee primates and as drug in humans. These compositions can also be administered in combination with other proteinaceous and non-proteinaceous drugs. These drugs may be administered simultaneously with the composition comprising the polypeptide of the invention as defined herein or separately before or after administration of said polypeptide in timely defined intervals and doses. The dosage regimen will be determined by the attending physician and clinical factors. As is well known in the medical arts, dosages for any one patient depend upon many factors, including the patient's size, body surface area, age, the particular compound to be administered, sex, time and route of administration, general health, and other drugs being administered concurrently.

[0280] Preparations for parenteral administration include sterile aqueous or non-aqueous solutions, suspensions, and emulsions. Examples of non-aqueous solvents are propylene glycol, polyethylene glycol, vegetable oils such as olive oil, and injectable organic esters such as ethyl oleate. Aqueous carriers include water, alcoholic/aqueous solutions, emulsions or suspensions, including saline and buffered media. Parenteral vehicles include sodium chloride solution, Ringers dextrose, dextrose and sodium chloride, lactated Ringers, or fixed oils. Intravenous vehicles include fluid and nutrient replenishers, electrolyte replenishers (such as those based on Ringers dextrose), and the like. Preservatives and other additives may also be present such as, for example, antimicrobials, anti-oxidants, chelating agents, inert gases and the like. In addition, the composition of the present invention might comprise proteinaceous carriers, like, e.g., serum albumin or immunoglobulin, preferably of human origin. It is envisaged that the composition of the invention might comprise, in addition to the polypeptide of the invention defined herein, further biologically active agents, depending on the intended use of the composition. Such agents might be drugs acting on the gastro-intestinal system, drugs acting as cytostatica, drugs preventing hyperurikemia, drugs inhibiting immunoreactions (e.g. corticosteroids), drugs modulating the inflammatory response, drugs acting on the circulatory system and/or agents such as cytokines known in the art. It is also envisaged that the binding molecule of the present invention is applied in a co-therapy, i.e., in combination with another anti-cancer medicament.

[0281] The biological activity of the pharmaceutical composition defined herein can be determined for instance by cytotoxicity assays, as described in the following examples, in WO 99/54440 or by Schlereth et al. (Cancer Immunol. Immunother. 20 (2005), 1-12). “Efficacy” or “in vivo efficacy” as used herein refers to the response to therapy by the pharmaceutical composition of the invention, using e.g. standardized NCI response criteria. The success or in vivo efficacy of the therapy using a pharmaceutical composition of the invention refers to the effectiveness of the composition for its intended purpose, i.e. the ability of the composition to cause its desired effect, i.e. depletion of pathologic cells, e.g. tumor cells. The in vivo efficacy may be monitored by established standard methods for the respective disease entities including, but not limited to white blood cell counts, differentials, Fluorescence Activated Cell Sorting, bone marrow aspiration. In addition, various disease specific clinical chemistry parameters and other established standard methods may be used. Furthermore, computer-aided tomography, X-ray, nuclear magnetic resonance tomography (e.g. for National Cancer Institute-criteria based response assessment [Cheson B D, Horning S J, Coiffier B, Shipp M A, Fisher R I, Connors J M, Lister T A, Vose J, Grillo-Lopez A, Hagenbeek A, Cabanillas F, Klippensten D, Hiddemann W, Castellino R, Harris N L, Armitage J O, Carter W, Hoppe R, Canellos G P. Report of an international workshop to standardize response criteria for non-Hodgkin's lymphomas. NCI Sponsored International Working Group. J Clin Oncol. 1999 April; 17(4):1244]), positron-emission tomography scanning, white blood cell counts, differentials, Fluorescence Activated Cell Sorting, bone marrow aspiration, lymph node biopsies/histologies, and various lymphoma specific clinical chemistry parameters (e.g. lactate dehydrogenase) and other established standard methods may be used.

[0282] Another major challenge in the development of drugs such as the pharmaceutical composition of the invention is the predictable modulation of pharmacokinetic properties. To this end, a pharmacokinetic profile of the drug candidate, i.e. a profile of the pharmacokinetic parameters that affect the ability of a particular drug to treat a given condition, can be established. Pharmacokinetic parameters of the drug influencing the ability of a drug for treating a certain disease entity include, but are not limited to: half-life, volume of distribution, hepatic first-pass metabolism and the degree of blood serum binding. The efficacy of a given drug agent can be influenced by each of the parameters mentioned above.

[0283] “Half-life” means the time where 50% of an administered drug are eliminated through biological processes, e.g. metabolism, excretion, etc.

[0284] By “hepatic first-pass metabolism” is meant the propensity of a drug to be metabolized upon first contact with the liver, i.e. during its first pass through the liver.

[0285] “Volume of distribution” means the degree of retention of a drug throughout the various compartments of the body, like e.g. intracellular and extracellular spaces, tissues and organs, etc. and the distribution of the drug within these compartments.

[0286] “Degree of blood serum binding” means the propensity of a drug to interact with and bind to blood serum proteins, such as albumin, leading to a reduction or loss of biological activity of the drug.

[0287] Pharmacokinetic parameters also include bioavailability, lag time (Tlag), Tmax, absorption rates, more onset and/or Cmax for a given amount of drug administered. “Bioavailability” means the amount of a drug in the blood compartment. “Lag time” means the time delay between the administration of the drug and its detection and measurability in blood or plasma.

[0288] “Tmax” is the time after which maximal blood concentration of the drug is reached, and “Cmax” is the blood concentration maximally obtained with a given drug. The time to reach a blood or tissue concentration of the drug which is required for its biological effect is influenced by all parameters. Pharmacokinetic parameters of bispecific single chain antibodies exhibiting cross-species specificity, which may be determined in preclinical animal testing in non-chimpanzee primates as outlined above, are also set forth e.g. in the publication by Schlereth et al. (Cancer Immunol. Immunother. 20 (2005), 1-12).

[0289] The term “toxicity” as used herein refers to the toxic effects of a drug manifested in adverse events or severe adverse events. These side events might refer to a lack of tolerability of the drug in general and/or a lack of local tolerance after administration. Toxicity could also include teratogenic or carcinogenic effects caused by the drug.

[0290] The term “safety”, “in vivo safety” or “tolerability” as used herein defines the administration of a drug without inducing severe adverse events directly after administration (local tolerance) and during a longer period of application of the drug. “Safety”, “in vivo safety” or “tolerability” can be evaluated e.g. at regular intervals during the treatment and follow-up period. Measurements include clinical evaluation, e.g. organ manifestations, and screening of laboratory abnormalities. Clinical evaluation may be carried out and deviations to normal findings recorded/coded according to NCI-CTC and/or MedDRA standards. Organ manifestations may include criteria such as allergy/immunology, blood/bone marrow, cardiac arrhythmia, coagulation and the like, as set forth e.g. in the Common Terminology Criteria for adverse events v3.0 (CTCAE). Laboratory parameters which may be tested include for instance hematology, clinical chemistry, coagulation profile and urine analysis and examination of other body fluids such as serum, plasma, lymphoid or spinal fluid, liquor and the like. Safety can thus be assessed e.g. by physical examination, imaging techniques (i.e. ultrasound, x-ray, CT scans, Magnetic Resonance Imaging (MRI), other measures with technical devices (i.e. electrocardiogram), vital signs, by measuring laboratory parameters and recording adverse events. For example, adverse events in non-chimpanzee primates in the uses and methods according to the invention may be examined by histopathological and/or histochemical methods.

[0291] The term “effective dose” or “effective dosage” is defined as an amount sufficient to achieve or at least partially achieve the desired effect. The term “therapeutically effective dose” is defined as an amount sufficient to cure or at least partially arrest the disease and its complications in a patient already suffering from the disease. Amounts effective for this use will depend upon the severity of the infection and the general state of the subject's own immune system. The term “patient” includes human and other mammalian subjects that receive either prophylactic or therapeutic treatment.

[0292] The term “effective and non-toxic dose” as used herein refers to a tolerable dose of an inventive binding molecule which is high enough to cause depletion of pathologic cells, tumor elimination, tumor shrinkage or stabilization of disease without or essentially without major toxic effects. Such effective and non-toxic doses may be determined e.g. by dose escalation studies described in the art and should be below the dose inducing severe adverse side events (dose limiting toxicity, DLT).

[0293] The above terms are also referred to e.g. in the Preclinical safety evaluation of biotechnology-derived pharmaceuticals S6; ICH Harmonised Tripartite Guideline; ICH Steering Committee meeting on Jul. 16, 1997.

[0294] The appropriate dosage, or therapeutically effective amount, of the binding molecule of the invention will depend on the condition to be treated, the severity of the condition, prior therapy, and the patient's clinical history and response to the therapeutic agent. The proper dose can be adjusted according to the judgment of the attending physician such that it can be administered to the patient one time or over a series of administrations. The pharmaceutical composition can be administered as a sole therapeutic or in combination with additional therapies such as anti-cancer therapies as needed.

[0295] The pharmaceutical compositions of this invention are particularly useful for parenteral administration, i.e., subcutaneously, intramuscularly, intravenously, intra-articular and/or intra-synovial. Parenteral administration can be by bolus injection or continuous infusion.

[0296] If the pharmaceutical composition has been lyophilized, the lyophilized material is first reconstituted in an appropriate liquid prior to administration. The lyophilized material may be reconstituted in, e.g., bacteriostatic water for injection (BWFI), physiological saline, phosphate buffered saline (PBS), or the same formulation the protein had been in prior to lyophilization. Preferably, the binding molecule of the invention or produced by a process of the invention is used in the prevention, treatment or amelioration of a disease selected from a proliferative disease, a tumorous disease, or an immunological disorder.

[0297] An alternative embodiment of the invention provides a method for the prevention, treatment or amelioration of a disease selected from a proliferative disease, a tumorous disease, or an immunological disorder comprising the step of administering to a patient in the need thereof the binding molecule of the invention or produced by a process of the invention.

[0298] The formulations described herein are useful as pharmaceutical compositions in the treatment, amelioration and/or prevention of the pathological medical condition as described herein in a patient in need thereof. The term “treatment” refers to both therapeutic treatment and prophylactic or preventative measures. Treatment includes the application or administration of the formulation to the body, an isolated tissue, or cell from a patient who has a disease/disorder, a symptom of a disease/disorder, or a predisposition toward a disease/disorder, with the purpose to cure, heal, alleviate, relieve, alter, remedy, ameliorate, improve, or affect the disease, the symptom of the disease, or the predisposition toward the disease.

[0299] Those “in need of treatment” include those already with the disorder, as well as those in which the disorder is to be prevented. The term “disease” is any condition that would benefit from treatment with the protein formulation described herein. This includes chronic and acute disorders or diseases including those pathological conditions that predispose the mammal to the disease in question. Non-limiting examples of diseases/disorders to be treated herein include proliferative disease, a tumorous disease, or an immunological disorder.

[0300] Preferably, the binding molecule of the invention is for use in the prevention, treatment or amelioration of B cell disorders that correlate with BCMA (over)expression such as plasma cell disorders, and/or autoimmune diseases. The autoimmune disease is, for example, systemic lupus erythematodes or rheumatoid arthritis.

[0301] Also provided by the present invention is a method for the treatment or amelioration of B cell disorders that correlate with BCMA (over)expression such as plasma cell disorders, and/or autoimmune diseases, comprising the step of administering to a subject in need thereof the binding molecule of the invention. The autoimmune disease is, for example, systemic lupus erythematodes or rheumatoid arthritis.

[0302] In plasma cell disorders, one clone of plasma cells multiplies uncontrollably. As a result, this clone produces vast amounts of a single (monoclonal) antibody known as the M-protein. In some cases, such as with monoclonal gammopathies, the antibody produced is incomplete, consisting of only light chains or heavy chains. These abnormal plasma cells and the antibodies they produce are usually limited to one type. Preferably, the plasma cell disorder is selected from the group consisting of multiple myeloma, plasmacytoma, plasma cell leukemia, macroglobulinemia, amyloidosis, Waldenstrom's macroglobulinemia, solitary bone plasmacytoma, extramedullary plasmacytoma, osteosclerotic myeloma, heavy chain diseases, monoclonal gammopathy of undetermined significance, and smoldering multiple myeloma.

[0303] In another aspect, kits are provided comprising a binding molecule of the invention, a nucleic acid molecule of the invention, a vector of the invention, or a host cell of the invention. The kit may comprise one or more vials containing the binding molecule and instructions for use. The kit may also contain means for administering the binding molecule of the present invention such as a syringe, pump, infuser or the like, means for reconstituting the binding molecule of the invention and/or means for diluting the binding molecule of the invention.

[0304] Furthermore, the present invention relates to the use of epitope cluster 3 of BCMA, preferably humanBCMA, for the generation of a binding molecule, preferably an antibody, which is capable of binding to BCMA, preferably human BCMA. The epitope cluster 3 of BCMA preferably corresponds to amino acid residues 24 to 41 of the sequence as depicted in SEQ ID NO: 1002.

[0305] In addition, the present invention provides a method for the generation of an antibody, preferably a bispecific binding molecule, which is capable of binding to BCMA, preferably human BCMA, comprising
[0306] (a) immunizing an animal with a polypeptide comprising epitope cluster 3 of BCMA, preferably human BCMA, wherein epitope cluster 3 of BCMA corresponds to amino acid residues 24 to 41 of the sequence as depicted in SEQ ID NO: 1002,
[0307] (b) obtaining said antibody, and
[0308] (c) optionally converting said antibody into a bispecific binding molecule which is capable of binding to human BCMA and preferably to the T cell CD3 receptor complex.

[0309] Preferably, step (b) includes that the obtained antibody is tested as follows: when the respective epitope cluster in the human BCMA protein is exchanged with the respective epitope cluster of a murine BCMA antigen (resulting in a construct comprising human BCMA, wherein human epitope cluster 3 is replaced with murine epitope cluster 3; see SEQ ID NO: 1011), a decrease in the binding of the antibody will occur. Said decrease is preferably at least 10%, 20%, 30%, 40%, 50%; more preferably at least 60%, 70%, 80%, 90%, 95% or even 100% in comparison to the respective epitope cluster in the human BCMA protein, whereby binding to the respective epitope cluster in the human BCMA protein is set to be 100%. It is envisaged that the aforementioned human BCMA/murine BCMA chimeras are expressed in CHO cells. It is also envisaged that the human BCMA/murine BCMA chimeras are fused with a transmembrane domain and/or cytoplasmic domain of a different membrane-bound protein such as EpCAM; see FIG. 2a.

[0310] A method to test this loss of binding due to exchange with the respective epitope cluster of a non-human (e.g. murine) BCMA antigen is described in the appended Examples, in particular in Examples 1-3.

[0311] The method may further include testing as to whether the antibody binds to epitope cluster 3 of human BCMA and is further capable of binding to epitope cluster 3 of macaque BCMA such as BCMA from Macaca mulatta (SEQ ID NO:1017) or Macaca fascicularis (SEQ ID NO:1017).

[0312] The present invention also provides binding molecules comprising any one of the amino acid sequences shown in SEQ ID NOs: 1-1000 and 1022-1093.

[0313] Preferably, a binding molecule comprises three VH CDR sequences (named “VH CDR1”, “VH CDR2”, “VH CDR3”, see 4^{th} column of the appended Sequence Table) from a binding molecule termed“BCMA-(X)”, wherein X is 1-100 (see 2^{nd} column of the appended Sequence Table) and/or three VL CDR sequences (named “VL CDR1”, “VH CDR2”, “VH CDR3”, see 4^{th} column of the appended Sequence Table) from a binding molecule term BCMA-X, wherein X is 1-100 (see 2^{nd} column of the appended Sequence Table).

[0314] Preferably, a binding molecule comprises a VH and/or VL sequence as is given in the appended Sequence Table (see 4^{th} column of the appended Sequence Table: “VH” and “VL”).

[0315] Preferably, a binding molecule comprises a scFV sequence as is given in the appended Sequence Table (see 4^{th} column of the appended Sequence Table: “scFv”).

[0316] Preferably, a binding molecule comprises a bispecific molecule sequence as is given in the appended Sequence Table (see 4^{th} column of the appended Sequence Table: “bispecific molecule”).

[0317] The present invention also relates to a bispecific binding agent comprising at least two binding domains, comprising a first binding domain and a second binding domain, wherein said first binding domain binds to the B cell maturation antigen BCMA and wherein said second binding domain binds to CD3 (item 1) also including the following items:
[0318] Item 2. The bispecific binding agent of item 1, wherein said first binding domain binds to the extracellular domain of BCMA and said second binding domain binds to the ε chain of CD3.
[0319] Item 3. A bispecific binding agent of item 1 or 2 which is in the format of a full-length antibody or an antibody fragment.
[0320] Item 4. A bispecific binding agent of item 3 in the format of a full-length antibody, wherein said first BCMA-binding domain is derived from mouse said and wherein said second CD3-binding domain is derived from rat.
[0321] Item 5. A bispecific binding agent of item 3, which is in the format of an antibody fragment in the form of a diabody that comprises a heavy chain variable domain connected to a light chain variable domain on the same polypeptide chain such that the two domains do not pair.
[0322] Item 6. A bispecific binding agent of item 1 or 2 which is in the format of a bispecific single chain antibody that consists of two scFv molecules connected via a linker peptide or by a human serum albumin molecule.
[0323] Item 7. The bispecific binding agent of item 6, heavy chain regions (VH) and the corresponding variable light chain regions (VL) are arranged, from N-terminus to C-terminus, in the order
   [0324] VH(BCMA)-VL(BCMA)-VH(CD3)-VL(CD3),
   [0325] VH(CD3)-VL(CD3)-VH(BCMA)-VL(BCMA) or
   [0326] VH CD3)-VL(CD3)-VL(BCMA)-VH(BCMA).
[0327] Item 8. A bispecific binding agent of item 1 or 2, which is in the format of a single domain immunoglobulin domain selected from VHHs or VHs.
[0328] Item 9. The bispecific binding agent of item 1 or 2, which is in the format of an Fv molecule that has four antibody variable domains with at least two binding domains, wherein at least one binding domain is specific to human BCMA and at least one binding domain is specific to human CD3.
[0329] Item 10. A bispecific binding agent of item 1 or 2, which is in the format of a single-chain binding molecule consisting of a first binding domain specific for BCMA, a constant sub-region that is located C-terminal to said first binding domain, a scorpion linker located C-terminal to the constant sub-region, and a second binding domain specific for CD3, which is located C-terminal to said constant sub-region.
[0330] Item 11. The bispecific binding agent of item 1 or 2, which is in the format of an antibody-like molecule that binds to BCMA via the two heavy chain/light chain Fv of an antibody or an antibody fragment and which binds to CD3 via a binding domain that has been engineered into non-CDR loops of the heavy chain or the light chain of said antibody or antibody fragment.
[0331] Item 12. A bispecific binding agent of item 1 which is in the format of a bispecific ankyrin repeat molecule.
[0332] Item 13. A bispecific binding agent of item 1, wherein said first binding domain has a format selected from the formats defined in any one of items 3 to 12 and wherein said second binding domain has a different format selected from the formats defined in any one of items 3 to 12.
[0333] Item 14. A bispecific binding agent of item 1 which is a bicyclic peptide.
[0334] Item 15. A pharmaceutical composition containing at least one bispecific binding agent of any one of items 1 to 14.
[0335] Item 16. A bispecific binding agent of any one of items 1 to 14 or a pharmaceutical composition of item 14 for the treatment of plasma cell disorders or other B cell disorders that correlate with BCMA expression and for the treatment of autoimmune diseases.
[0336] Item 17. A bispecific binding agent of any one of items 1 to 14 or a pharmaceutical composition of item 15 for the treatment of plasma cell disorders selected from plasmacytoma, plasma cell leukemia, multiple myeloma, macroglobulinemia, amyloidosis, Waldenstrom's macroglobulinemia, solitary bone plasmacytoma, extramedullary plasmacytoma, osteosclerotic myeloma, heavy chain diseases, monoclonal gammopathy of undetermined significance, smoldering multiple myeloma.

[0337] Variations of the above items are derivable from EP10 191 418.2 which are also included herein.

[0338] It should be understood that the inventions herein are not limited to particular methodology, protocols, or reagents, as such can vary. The discussion and examples provided herein are presented for the purpose of describing particular embodiments only and are not intended to limit the scope of the present invention, which is defined solely by the claims.

[0339] All publications and patents cited throughout the text of this specification (including all patents, patent applications, scientific publications, manufacturer's specifications, instructions, etc.), whether supra or infra, are hereby incorporated by reference in their entirety. Nothing herein is to be construed as an admission that the invention is not entitled to antedate such disclosure by virtue of prior invention. To the extent the material incorporated by reference contradicts or is inconsistent with this specification, the specification will supersede any such material.

[0340] The Figures show:

[0341] FIG. 1:

[0342] Sequence alignment of the extracellular domain (ECD) of human BCMA (amino acid residues 1-54 of the full-length protein) and murine BCMA (amino acid residues 1-49 of the full-length protein). Highlighted are the regions (domains or amino acid residues) which were exchanged in the chimeric constructs, as designated for the epitope clustering. Cysteines are depicted by black boxes. Disulfide bonds are indicated.

[0343] FIG. 2:

[0344] Epitope mapping of the BCMA constructs. Human and murineBCMA (FIG. 2a) as well as seven chimeric human-murine BCMA constructs (FIG. 2b) expressed on the surface of CHO cells as shown by flow cytometry. The expression of human BCMA on CHO was detected with a monoclonal anti-human BCMA antibody. Murine BCMA expression was detected with a monoclonal anti-murine BCMA-antibody. Bound monoclonal antibody was detected with an anti-rat IgG-Fc-gamma-specific antibody conjugated to phycoerythrin.

[0345] FIG. 3:

[0346] Examples of binding molecules specific for epitope cluster E3, as detected by epitope mapping of the chimeric BCMA constructs (see example 3).

[0347] FIG. 4:

[0348] Determination of binding constants of bispecific binding molecules (anti BCMA×anti CD3) on human and macaque BCMA using the Biacore system. Antigen was immobilized in low to intermediate density (100 RU) on CM5 chip. Dilutions of binders were floated over the chip surface and binding determined using BiaEval Software. Respective off-rates and the binding constant (KD) of the respective binders are depicted below every graph.

[0349] FIG. 5:

[0350] Cytotoxic activity of BCMAbispecific antibodies as measured in an 18-hour ⁵¹chromium release assay. Effector cells: stimulated enriched human CD8 T cells. Target cells: Human BCMA transfected CHO cells (left figure) and macaque BCMA transfected CHO cells (right figure). Effector to target cell (E:T) ratio: 10:1.

[0351] FIG. 6:

[0352] Determination of binding constants of BCMA/CD3 bispecific antibodies of epitope cluster E3 on human and macaque BCMA and on human and macaque CD3 using the Biacore system. Antigen was immobilized in low to intermediate density (100-200 RU) on CM5 chip. Dilutions of bispecific antibodies were floated over the chip surface and binding determined using BiaEval Software. Respective on- and off-rates and the resulting binding constant (KD) of the respective bispecific antibodies are depicted below every graph.

[0353] FIG. 7:

[0354] FACS analysis of BCMA/CD3 bispecific antibodies of epitope cluster E3 on indicated cell lines: 1) human BCMA transfected CHO cells, 2) human CD3 positive human T cell line HBP-ALL, 3) macaque BCMA transfected CHO cells, 4) macaque T cell line 4119 LnPx, 5) BCMA-positive human multiple myeloma cell line NCI-H929 and 6) untransfected CHO cells. Negative controls [1) to 6)]: detection antibodies without prior BCMA/CD3 bispecific antibody.

[0355] FIG. 8:

[0356] Scatchard analysis of BCMA/CD3 bispecific antibodies on BCMA-expressing cells. Cells were incubated with increasing concentrations of monomeric antibody until saturation. Antibodies were detected by flow cytometry. Values of triplicate measurements were plotted as hyperbolic curves and as sigmoid curves to demonstrate a valid concentration range used. Maximal binding was determined using Scatchard evaluation, and the respective KD values were calculated.

[0357] FIG. 9:

[0358] Cytotoxic activity of BCMA/CD3 bispecific antibodies of epitope cluster E3, as measured in an 18-hour 51-chromium release assay against CHO cells transfected with human BCMA. Effector cells: stimulated enriched human CD8 T cells. Effector to target cell (E:T) ratio: 10:1.

[0359] FIG. 10:

[0360] Cytotoxic activity of BCMA/CD3 bispecific antibodies of epitope cluster E3 as measured in a 48-hour FACS-based cytotoxicity assay. Effector cells: unstimulated human PBMC. Target cells: CHO cells transfected with human BCMA. Effector to target cell (E:T)-ratio: 10:1.

[0361] FIG. 11:

[0362] FACS analysis of BCMA/CD3 bispecific antibodies of epitope cluster E3 on BAFF-R and TACI transfected CHO cells. Cell lines: 1) human BAFF-R transfected CHO cells, 2) human TACI transfected CHO cells 3) multiple myeloma cell line L363; negative controls: detection antibodies without prior BCMA/CD3 bispecific antibody. Positive controls: BAFF-R detection: goat anti hu BAFF-R (R&D AF1162; 1:20) detected by anti-goat antibody-PE (Jackson 705-116-147; 1:50) TACI-detection: rabbit anti TACI antibody (abcam AB 79023; 1:100) detected by goat anti rabbit-antibody PE (Sigma P9757; 1:20).

[0363] FIG. 12:

[0364] Cytotoxic activity of BCMA/CD3 bispecific antibodies as measured in an 18-hour 51-chromium release assay. Effector cells: stimulated enriched human CD8 T cells. Target cells: BCMA-positive human multiple myeloma cell line L363 (i.e. natural expresser). Effector to target cell (E:T) ratio: 10:1.

[0365] FIG. 13:

[0366] Cytotoxic activity of BCMA/CD3 bispecific antibodies as measured in a 48-hour FACS-based cytotoxicity assay. Effector cells: unstimulated human PBMC. Target cells: human multiple myeloma cell line L363 (natural BCMA expresser). Effector to target cell (E:T)-ratio: 10:1.

[0367] FIG. 14:

[0368] Cytotoxic activity of BCMA/CD3 bispecific antibodies as measured in a 48-hour FACS-based cytotoxicity assay. Effector cells: unstimulated human PBMC. Target cells: BCMA-positive human multiple myeloma cell line NCI-H929. Effector to target cell (E:T)-ratio: 10:1.

[0369] FIG. 15:

[0370] Cytotoxic activity of BCMA/CD3 bispecific antibodies as measured in a 48-hour FACS-based cytotoxicity assay. Effector cells: macaque T cell line 4119LnPx. Target cells: CHO cells transfected with macaque BCMA. Effector to target cell (E:T) ratio: 10:1.

[0371] FIG. 16:

[0372] Anti-tumor activity of BCMA/CD3 bispecific antibodies of epitope cluster E3 in an advanced-stage NCI-H929 xenograft model (see Example 16).

[0373] FIG. 17:

[0374] FACS-based cytotoxicity assay using human multiple myeloma cell lines NCI-H929, L-363 and OPM-2 as target cells and human PBMC as effector cells (48 h; E:T=10:1). The figure depicts the cytokine levels [pg/ml] which were determined for 11-2, IL-6, IL-10, TNF and IFN-gamma at increasing concentrations of the BCMA/CD3 bispecific antibodies of epitope cluster E3 (see Example 22).

### EXAMPLES

[0375] The following examples illustrate the invention. These examples should not be construed as to limit the scope of this invention. The examples are included for purposes of illustration, and the present invention is limited only by the claims.

### Example 1

### Generation of CHO Cells Expressing Chimeric BCMA

[0376] For the construction of the chimeric epitope mapping molecules, the amino acid sequence of the respective epitope domains or the single amino acid residue of human BCMA was changed to the murine sequence. The following molecules were constructed:
[0377] Human BCMA ECD/E1 murine (SEQ ID NO: 1009)

[0378] Chimeric extracellular BCMA domain: Human extracellular BCMA domain wherein epitope cluster 1 (amino acid residues 1-7 of SEQ ID NO: 1002 or 1007) is replaced by the respective murine cluster (amino acid residues 1-4 of SEQ ID NO: 1004 or 1008)

→deletion of amino acid residues 1-3 and G6Q mutation in SEQ ID NO: 1002 or 1007
[0379] Human BCMA ECD/E2 murine (SEQ ID NO: 1010)

[0380] Chimeric extracellular BCMA domain: Human extracellular BCMA domain wherein epitope cluster 2 (amino acid residues 8-21 of SEQ ID NO: 1002 or 1007) is replaced by the respective murine cluster (amino acid residues 5-18 of SEQ ID NO: 1004 or 1008)

→S9F, Q10H, and N11S mutations in SEQ ID NO: 1002 or 1007
[0381] Human BCMA ECD/E3 murine (SEQ ID NO: 1011)

[0382] Chimeric extracellular BCMA domain: Human extracellular BCMA domain wherein epitope cluster 3 (amino acid residues 24-41 of SEQ ID NO: 1002 or 1007) is replaced by the respective murine cluster (amino acid residues 21-36 of SEQ ID NO: 1004 or 1008)

→deletion of amino acid residues 31 and 32 and Q25H, S30N, L35A, and R39P mutation in SEQ ID NO: 1002 or 1007
[0383] Human BCMA ECD/E4 murine (SEQ ID NO: 1012)

[0384] Chimeric extracellular BCMA domain: Human extracellular BCMA domain wherein epitope cluster 4 (amino acid residues 42-54 of SEQ ID NO: 1002 or 1007) is replaced by the respective murine cluster (amino acid residues 37-49 of SEQ ID NO: 1004 or 1008)

→N42D, A43P, N47S, N53Y and A54T mutations in SEQ ID NO: 1002 or 1007
[0385] Human BCMA ECD/E5 murine (SEQ ID NO: 1013)

[0386] Chimeric extracellular BCMA domain: Human extracellular BCMA domain wherein the amino acid residue at position 22 of SEQ ID NO: 1002 or 1007 (isoleucine) is replaced by its respective murine amino acid residue of SEQ ID NO: 1004 or 1008 (lysine, position 19)

→I22K mutation in SEQ ID NO: 1002 or 1007
[0387] Human BCMA ECD/E6 murine (SEQ ID NO: 1014)

[0388] Chimeric extracellular BCMA domain: Human extracellular BCMA domain wherein the amino acid residue at position 25 of SEQ ID NO: 1002 or 1007 (glutamine) is replaced by its respective murine amino acid residue of SEQ ID NO: 1004 or 1008 (histidine, position 22)

→Q25H mutation in SEQ ID NO: 1002 or 1007
[0389] Human BCMA ECD/E7 murine (SEQ ID NO: 1015)

[0390] Chimeric extracellular BCMA domain: Human extracellular BCMA domain wherein the amino acid residue at position 39 of SEQ ID NO: 1002 or 1007 (arginine) is replaced by its respective murine amino acid residue of SEQ ID NO: 1004 or 1008 (proline, position 34)

→R39P mutation in SEQ ID NO: 1002 or 1007

[0391] A) The cDNA constructs were cloned into the mammalian expression vector pEF-DHFR and stably transfected into CHO cells. The expression of human BCMA on CHO cells was verified in a FACS assay using a monoclonal anti-human BCMA antibody. Murine BCMA expression was demonstrated with a monoclonal anti-mouse BCMA-antibody. The used concentration of the BCMA antibodies was 10 μg/ml in PBS/2% FCS. Bound monoclonal antibodies were detected with an anti-rat-IgG-Fcy-PE (1:100 in PBS/2% FCS; Jackson-Immuno-Research #112-116-071). As negative control, cells were incubated with PBS/2% FCS instead of the first antibody. The samples were measured by flow cytometry on a FACSCanto II instrument (Becton Dickinson) and analyzed by FlowJo software (Version 7.6). The surface expression of human-murine BCMA chimeras, transfected CHO cells were analyzed and confirmed in a flow cytometry assay with different anti-BCMA antibodies (FIG. 2).

[0392] B) For the generation of CHO cells expressing human, macaque, mouse and human/mouse chimeric transmembrane BCMA, the coding sequences of human, macaque, mouse BCMA and the human-mouse BCMA chimeras (BCMA sequences as published in GenBank, accession numbers NM_{—}001192 [human]; NM_{—}011608 [mouse] and XM_{—}001106892 [macaque]) were obtained by gene synthesis according to standard protocols. The gene synthesis fragments were designed as to contain first a Kozak site for eukaryotic expression of the constructs and the coding sequence of a 19 amino acid immunoglobulin leader peptide, followed in frame by the coding sequence of the BCMA proteins respectively in case of the chimeras with the respective epitope domains of the human sequence exchanged for the murine sequence.

[0393] Except for the human BCMA ECD/E4 murine and human BCMA constructs the coding sequence of the extracellular domain of the BCMA proteins was followed in frame by the coding sequence of an artificial Ser1-Gly4-Ser1-linker followed by the intracellular domain of human EpCAM (amino acids 226-314; sequence as published in GenBank accession number NM_{—}002354).

[0394] All coding sequences were followed by a stop codon. The gene synthesis fragments were also designed as to introduce suitable restriction sites. The gene synthesis fragments were cloned into a plasmid designated pEF-DHFR (pEF-DHFR is described in Raum et al. Cancer Immunol Immunother 50 (2001) 141-150). All aforementioned procedures were carried out according to standard protocols (Sambrook, Molecular Cloning; A Laboratory Manual, 3rd edition, Cold Spring Harbour Laboratory Press, Cold Spring Harbour, New York (2001)). For each antigen a clone with sequence-verified nucleotide sequence was transfected into DHFR deficient CHO cells for eukaryotic expression of the constructs. Eukaryotic protein expression in DHFR deficient CHO cells was performed as described by Kaufman R. J. (1990) Methods Enzymol. 185, 537-566. Gene amplification of the constructs was induced by increasing concentrations of methotrexate (MTX) to a final concentration of up to 20 nM MTX.

### Example 2

### 2.1 Transient Expression in HEK 293 Cells

[0395] Clones of the expression plasmids with sequence-verified nucleotide sequences were used for transfection and protein expression in the FreeStyle 293 Expression System (Invitrogen GmbH, Karlsruhe, Germany) according to the manufacturer's protocol. Supernatants containing the expressed proteins were obtained, cells were removed by centrifugation and the supernatants were stored at −20 C.

### 2.2 Stable Expression in CHO Cells

[0396] Clones of the expression plasmids with sequence-verified nucleotide sequences were transfected into DHFR deficient CHO cells for eukaryotic expression of the constructs. Eukaryotic protein expression in DHFR deficient CHO cells was performed as described by Kaufman R. J. (1990) Methods Enzymol. 185, 537-566. Gene amplification of the constructs was induced by increasing concentrations of methotrexate (MTX) to a final concentration of 20 nM MTX. After two passages of stationary culture the cells were grown in roller bottles with nucleoside-free HyQ PF CHO liquid soy medium (with 4.0 mM L-Glutamine with 0.1% Pluronic F-68; HyClone) for 7 days before harvest. The cells were removed by centrifugation and the supernatant containing the expressed protein was stored at −20 C.

### 2.3 Protein Purification

[0397] Purification of soluble BCMA proteins was performed as follows: Åkta® Explorer System (GE Healthcare) and Unicorn® Software were used for chromatography. Immobilized metal affinity chromatography (“IMAC”) was performed using a Fractogel EMD Chelate® (Merck) which was loaded with ZnCl2 according to the protocol provided by the manufacturer. The column was equilibrated with buffer A (20 mM sodium phosphate buffer pH 7.2, 0.1 M NaCl) and the filtrated (0.2 μm) cell culture supernatant was applied to the column (10 ml) at a flow rate of 3 ml/min. The column was washed with buffer A to remove unbound sample. Bound protein was eluted using a two-step gradient of buffer B (20 mM sodium phosphate buffer pH 7.2, 0.1 M NaCl, 0.5 M imidazole) according to the following procedure:

Step 1: 10% buffer B in 6 column volumes
Step 2: 100% buffer B in 6 column volumes

[0398] Eluted protein fractions from step 2 were pooled for further purification. All chemicals were of research grade and purchased from Sigma (Deisenhofen) or Merck (Darmstadt).

[0399] Gel filtration chromatography was performed on a HiLoad 16/60 Superdex 200 prep grade column (GE/Amersham) equilibrated with Equi-buffer (10 mM citrate, 25 mM lysine-HCl, pH 7.2 for proteins expressed in HEK cells and PBS pH 7.4 for proteins expressed in CHO cells). Eluted protein samples (flow rate 1 ml/min) were subjected to standard SDS-PAGE and Western Blot for detection. Protein concentrations were determined using OD280 nm.

[0400] Proteins obtained via transient expression in HEK 293 cells were used for immunizations. Proteins obtained via stable expression in CHO cells were used for selection of binders and for measurement of binding.

### Example 3

### Epitope Clustering of Murine scFv-Fragments

[0401] Cells transfected with human or murine BCMA, or with chimeric BCMA molecules were stained with crude, undiluted periplasmic extract containing scFv binding to human/macaque BCMA. Bound scFv were detected with 1 μg/ml of an anti-FLAG antibody (Sigma F1804) and a R-PE-labeled anti-mouse Fc gamma-specific antibody (1:100; Dianova #115-116-071). All antibodies were diluted in PBS with 2% FCS. As negative control, cells were incubated with PBS/2% FCS instead of the periplasmic extract. The samples were measured by flow cytometry on a FACSCanto II instrument (Becton Dickinson) and analyzed by FlowJo software (Version 7.6); see FIG. 3.

### Example 4

### Procurement of Different Recombinant Forms of Soluble Human and Macaque BCMA

[0402] A) The coding sequences of human and rhesus BCMA (as published in GenBank, accession numbers NM_{—}001192 [human], XM_{—}001106892 [rhesus]) coding sequences of human albumin, human Fcγ1 and murine albumin were used for the construction of artificial cDNA sequences encoding soluble fusion proteins of human and macaque BCMA respectively and human albumin, human IgG1 Fc and murine albumin respectively as well as soluble proteins comprising only the extracellular domains of BCMA. To generate the constructs for expression of the soluble human and macaque BCMA proteins, cDNA fragments were obtained by PCR mutagenesis of the full-length BCMA cDNAs described above and molecular cloning according to standard protocols. For the fusions with human albumin, the modified cDNA fragments were designed as to contain first a Kozak site for eukaryotic expression of the constructs followed by the coding sequence of the human and rhesus (or Macaca mulatta) BCMA proteins respectively, comprising amino acids 1 to 54 and 1 to 53 corresponding to the extracellular domain of human and rhesus BCMA, respectively, followed in frame by the coding sequence of an artificial Ser1-Gly4-Ser1-linker, followed in frame by the coding sequence of human serum albumin, followed in frame by the coding sequence of a Flag tag, followed in frame by the coding sequence of a modified histidine tag (SGHHGGHHGGHH) and a stop codon.

[0403] For the fusions with murine IgG1, the modified cDNA fragments were designed as to contain first a Kozak site for eukaryotic expression of the constructs followed by the coding sequence of the human and macaque BCMA proteins respectively, comprising amino acids 1 to 54 and 1 to 53 corresponding to the extracellular domain of human and rhesus BCMA, respectively, followed in frame by the coding sequence of an artificial Ser1-Gly4-Ser1-linker, followed in frame by the coding sequence of the hinge and Fc gamma portion of human IgG1, followed in frame by the coding sequence of a hexahistidine tag and a stop codon.

[0404] For the fusions with murine albumin, the modified cDNA fragments were designed as to contain first a Kozak site for eukaryotic expression of the constructs followed by the coding sequence of the human and macaque BCMA proteins respectively, comprising amino acids 1 to 54 and 1 to 53 corresponding to the extracellular domain of human and rhesus BCMA, respectively, followed in frame by the coding sequence of an artificial Ser1-Gly4-Ser1-linker, followed in frame by the coding sequence of murine serum albumin, followed in frame by the coding sequence of a Flag tag, followed in frame by the coding sequence of a modified histidine tag (SGHHGGHHGGHH) and a stop codon.

[0405] For the soluble extracellular domain constructs, the modified cDNA fragments were designed as to contain first a Kozak site for eukaryotic expression of the constructs followed by the coding sequence of the human and macaque BCMA proteins respectively, comprising amino acids 1 to 54 and 1 to 53 corresponding to the extracellular domain of human and rhesus BCMA, respectively, followed in frame by the coding sequence of an artificial Ser1-Gly1-linker, followed in frame by the coding sequence of a Flag tag, followed in frame by the coding sequence of a modified histidine tag (SGHHGGHHGGHH) and a stop codon.

[0406] The cDNA fragments were also designed to introduce restriction sites at the beginning and at the end of the fragments. The introduced restriction sites, EcoRI at the 5′ end and SalI at the 3′ end, were utilized in the following cloning procedures. The cDNA fragments were cloned via EcoRI and SalI into a plasmid designated pEF-DHFR (pEF-DHFR is described in Raum et al. Cancer Immunol Immunother 50 (2001) 141-150). The aforementioned procedures were all carried out according to standard protocols (Sambrook, Molecular Cloning; A Laboratory Manual, 3rd edition, Cold Spring Harbour Laboratory Press, Cold Spring Harbour, New York (2001)).

[0407] B) The coding sequences of human and macaque BCMA as described above and coding sequences of human albumin, human Fcγ1, murine Fcγ1, murine Fcγ2a, murine albumin, rat albumin, rat Fcγ1 and rat Fcγ2b were used for the construction of artificial cDNA sequences encoding soluble fusion proteins of human and macaque BCMA respectively and human albumin, human IgG1 Fc, murine IgG1 Fc, murine IgG2a Fc, murine albumin, rat IgG1 Fc, rat IgG2b and rat albumin respectively as well as soluble proteins comprising only the extracellular domains of BCMA. To generate the constructs for expression of the soluble human and macaque BCMA proteins cDNA fragments were obtained by PCR mutagenesis of the full-length BCMA cDNAs described above and molecular cloning according to standard protocols.

[0408] For the fusions with albumins the modified cDNA fragments were designed as to contain first a Kozak site for eukaryotic expression of the constructs and the coding sequence of a 19 amino acid immunoglobulin leader peptide, followed in frame by the coding sequence of the extracellular domain of the respective BCMA protein followed in frame by the coding sequence of an artificial Ser1-Gly4-Ser1-linker, followed in frame by the coding sequence of the respective serum albumin, followed in frame by the coding sequence of a Flag tag, followed in frame by the coding sequence of a modified histidine tag (SGHHGGHHGGHH) and a stop codon.

[0409] For the fusions with IgG Fcs the modified cDNA fragments were designed as to contain first a Kozak site for eukaryotic expression of the constructs and the coding sequence of a 19 amino acid immunoglobulin leader peptide, followed in frame by the coding sequence of the extracellular domain of the respective BCMA protein followed in frame by the coding sequence of an artificial Ser1-Gly4-Ser1-linker, except for human IgG1 Fc where an artificial Ser1-Gly1-linker was used, followed in frame by the coding sequence of the hinge and Fc gamma portion of the respective IgG, followed in frame by the coding sequence of a Flag tag, followed in frame by the coding sequence of a modified histidine tag (SGHHGGHHGGHH) and a stop codon.

[0410] For the soluble extracellular domain constructs the modified cDNA fragments were designed as to contain first a Kozak site for eukaryotic expression of the constructs and the coding sequence of a 19 amino acid immunoglobulin leader peptide, followed in frame by the coding sequence of the extracellular domain of the respective BCMA protein followed in frame by the coding sequence of an artificial Ser1-Gly1-linker, followed in frame by the coding sequence of a Flag tag, followed in frame by the coding sequence of a modified histidine tag (SGHHGGHHGGHH) and a stop codon.

[0411] For cloning of the constructs suitable restriction sites were introduced. The cDNA fragments were all cloned into a plasmid designated pEF-DHFR (pEF-DHFR is described in Raum et al. 2001). The aforementioned procedures were all carried out according to standard protocols (Sambrook, 2001).

[0412] The following constructs were designed to enable directed panning on distinct epitopes. The coding sequence of murine-human BCMA chimeras and murine-macaque BCMA chimeras (mouse, human and macaque BCMA sequences as described above) and coding sequences of murine albumin and murine Fcγ1 were used for the construction of artificial cDNA sequences encoding soluble fusion proteins of murine-human and murine-macaque BCMA chimeras respectively and murine IgG1 Fc and murine albumin, respectively. To generate the constructs for expression of the soluble murine-human and murine-macaque BCMA chimeras cDNA fragments of murine BCMA (amino acid 1-49) with the respective epitope domains mutated to the human and macaque sequence respectively were obtained by gene synthesis according to standard protocols. Cloning of constructs was carried out as described above and according to standard protocols (Sambrook, 2001).

[0413] The following molecules were constructed:
[0414] amino acid 1-4 human, murine IgG1 Fc
[0415] amino acid 1-4 human, murine albumin
[0416] amino acid 1-4 rhesus, murine IgG1 Fc
[0417] amino acid 1-4 rhesus, murine albumin
[0418] amino acid 5-18 human, murine IgG1 Fc
[0419] amino acid 5-18 human, murine albumin
[0420] amino acid 5-18 rhesus, murine IgG1 Fc
[0421] amino acid 5-18 rhesus, murine albumin
[0422] amino acid 37-49 human, murine IgG1 Fc
[0423] amino acid 37-49 human, murine albumin
[0424] amino acid 37-49 rhesus, murine IgG1 Fc
[0425] amino acid 37-49 rhesus, murine albumin

### Example 5

### 5.1 Biacore-Based Determination of Bispecific Antibody Affinity to Human and Macaque BCMA and CD3

[0426] Biacore analysis experiments were performed using recombinant BCMA fusion proteins with human serum albumin (ALB) to determine BCMA target binding. For CD3 affinity measurements, recombinant fusion proteins having the N-terminal 27 amino acids of the CD3 epsilon (CD3e) fused to human antibody Fc portion were used. This recombinant protein exists in a human CD3e1-27 version and in a cynomolgous CD3e version, both bearing the epitope of the CD3 binder in the bispecific antibodies.

[0427] In detail, CM5 Sensor Chips (GE Healthcare) were immobilized with approximately 100 to 150 RU of the respective recombinant antigen using acetate buffer pH4.5 according to the manufacturer's manual. The bispecific antibody samples were loaded in five concentrations: 50 nM, 25 nM, 12.5 nM, 6.25 nM and 3.13 nM diluted in HBS-EP running buffer (GE Healthcare). Flow rate was 30 to 35 μl/min for 3 min, then HBS-EP running buffer was applied for 8 min again at a flow rate of 30 to 35 μl/ml. Regeneration of the chip was performed using 10 mM glycine 0.5 M NaCl pH 2.45. Data sets were analyzed using BiaEval Software (see FIG. 4). In general two independent experiments were performed.

### 5.2 Binding Affinity to Human and Macaque BCMA

[0428] Binding affinities of BCMA/CD3 bispecific antibodies to human and macaque BCMA were determined by Biacore analysis using recombinant BCMA fusion proteins with mouse albumin (ALB).

[0429] In detail, CM5 Sensor Chips (GE Healthcare) were immobilized with approximately 150 to 200 RU of the respective recombinant antigen using acetate buffer pH4.5 according to the manufacturer's manual. The bispecific antibody samples were loaded in five concentrations: 50 nM, 25 nM, 12.5 nM, 6.25 nM and 3.13 nM diluted in HBS-EP running buffer (GE Healthcare). For BCMA affinity determinations the flow rate was 35 μl/min for 3 min, then HBS-EP running buffer was applied for 10, 30 or 60 min again at a flow rate of 35 μl/ml. Regeneration of the chip was performed using a buffer consisting of a 1:1 mixture of 10 mM glycine 0.5 M NaCl pH 1.5 and 6 M guanidine chloride solution. Data sets were analyzed using BiaEval Software (see FIG. 6). In general two independent experiments were performed.

[0430] Confirmative human and macaque CD3 epsilon binding was performed in single experiments using the same concentrations as applied for BCMA binding; off-rate determination was done for 10 min dissociation time.

[0431] All BCMA/CD3 bispecific antibodies of epitope cluster E3 showed high affinities to human BCMA in the sub-nanomolar range down to 1-digit picomolar range. Binding to macaque BCMA was balanced, also showing affinities in the 1-digit nanomolar down to subnanomolar range. Affinities and affinity gaps of BCMA/CD3 bispecific antibodies are shown in Table 2.

TABLE 2
Affinities of BCMA/CD3 bispecific antibodies of the epitope cluster
E3 to human and macaque BCMA as determined by Biacore analysis,
and calculated affinity gaps (ma BCMA:hu BCMA).

| BCMA/CD3 | hu BCMA | ma BCMA | Affinity gap |
|---|---|---|---|
| bispecific antibody | [nM] | [nM] | ma BCMA:hu BCMA |
| BCMA-83 | 0.031 | 0.077 | 2.5 |
| BCMA-98 | 0.025 | 0.087 | 3.5 |
| BCMA-71 | 0.60 | 2.2 | 3.7 |
| BCMA-34 | 0.051 | 0.047 | 1:1.1 |
| BCMA-74 | 0.088 | 0.12 | 1.4 |
| BCMA-20 | 0.0085 | 0.016 | 1.9 |

### 5.3 Biacore-Based Determination of the Bispecific Antibody Affinity to Human and Macaque BCMA

[0432] The affinities of BCMA/CD3 bispecific antibodies to recombinant soluble BCMA on CM5 chips in Biacore measurements were repeated to reconfirm KDs and especially off-rates using longer dissociation periods (60 min instead of 10 min as used in the previous experiment). All of the tested BCMA/CD3 bispecific antibodies underwent two independent affinity measurements with five different concentrations each.

[0433] The affinities of the BCMA/CD3 bispecific antibodies of the epitope cluster E3 were clearly subnanomolar down to 1-digit picomolar, see examples in Table 3.

TABLE 3
Affinities (KD) of BCMA/CD3 bispecific antibodies of the epitope
cluster E3 from Biacore experiments using extended dissociation times
(two independent experiments each).

| BCMA/CD3 | KD [nM] | KD [nM] |
|---|---|---|
| bispecific antibody | human BCMA | macaque BCMA |
| BCMA-83 | 0.053 ± 0.017 | 0.062 ± 0.011 |
| BCMA-98 | 0.025 ± 0.003 | 0.060 ± 0.001 |
| BCMA-71 | 0.242 ± 0.007 | 0.720 ± 0.028 |
| BCMA-34 | 0.089 ± 0.019 | 0.056 ± 0.003 |
| BCMA-74 | 0.076 ± 0.002 | 0.134 ± 0.010 |
| BCMA-20 | 0.0095 ± 0.0050 | 0.0060 ± 0.0038 |

### Example 6

### Bispecific Binding and Interspecies Cross-Reactivity

[0434] For confirmation of binding to human and macaque BCMA and CD3, bispecific antibodies were tested by flow cytometry using CHO cells transfected with human and macaque BCMA, respectively, the human multiple myeloma cell line NCI-H929 expressing native human BCMA, CD3-expressing human T cell leukemia cell line HPB-ALL (DSMZ, Braunschweig, ACC483) and the CD3-expressing macaque T cell line 4119LnPx (Knappe A, et al., Blood, 2000, 95, 3256-3261). Moreover, untransfected CHO cells were used as negative control.

[0435] For flow cytometry 200,000 cells of the respective cell lines were incubated for 30 min on ice with 50 μl of purified bispecific antibody at a concentration of 5 μg/ml. The cells were washed twice in PBS/2% FCS and binding of the constructs was detected with a murine PentaHis antibody (Qiagen; diluted 1:20 in 50 μl PBS/2% FCS). After washing, bound PentaHis antibodies were detected with an Fc gamma-specific antibody (Dianova) conjugated to phycoerythrin, diluted 1:100 in PBS/2% FCS. Samples were measured by flow cytometry on a FACSCanto II instrument and analyzed by FACSDiva software (both from Becton Dickinson).

[0436] The BCMA/CD3 bispecific antibodies of epitope cluster E3 stained CHO cells transfected with human and macaque BCMA, the human BCMA-expressing multiple myeloma cell line NCI-H929 as well as human and macaque T cells. Moreover, there was no staining of untransfected CHO cells (see FIG. 7).

### Example 7

### Scatchard-Based Determination of Bispecific-Antibody Affinity to Human and Macaque BCMA

[0437] For Scatchard analysis, saturation binding experiments are performed using a monovalent detection system developed at Micromet (anti-His Fab/Alexa 488) to precisely determine monovalent binding of the bispecific antibodies to the respective cell line.

[0438] 2×10⁴ cells of the respective cell line (recombinantly human BCMA-expressing CHO cell line, recombinantly macaque BCMA-expressing CHO cell line) are incubated with each 50 μl of a triplet dilution series (eight dilutions at 1:2) of the respective BCMA bispecific antibody starting at 100 nM followed by 16 h incubation at 4° C. under agitation and one residual washing step. Then, the cells are incubated for further 30 min with 30 μl of an anti-His Fab/Alexa488 solution (Micromet; 30 μg/ml). After one washing step, the cells are resuspended in 150 μl FACS buffer containing 3.5% formaldehyde, incubated for further 15 min, centrifuged, resuspended in FACS buffer and analyzed using a FACS Cantoll machine and FACS Diva software. Data are generated from two independent sets of experiments. Values are plotted as hyperbole binding curves. Respective Scatchard analysis is calculated to extrapolate maximal binding (Bmax). The concentrations of bispecific antibodies at half-maximal binding are determined reflecting the respective KDs. Values of triplicate measurements are plotted as hyperbolic curves. Maximal binding is determined using Scatchard evaluation and the respective KDs are calculated.

[0439] The affinities of BCMA/CD3 bispecific antibodies to CHO cells transfected with human or macaque BCMA were determined by Scatchard analysis as the most reliable method for measuring potential affinity gaps between human and macaque BCMA.

[0440] Cells expressing the BCMA antigen were incubated with increasing concentrations of the respective monomeric BCMA/CD3 bispecific antibody until saturation was reached (16 h). Bound bispecific antibody was detected by flow cytometry. The concentrations of BCMA/CD3 bispecific antibodies at half-maximal binding were determined reflecting the respective KDs.

[0441] Values of triplicate measurements were plotted as hyperbolic curves and as S-shaped curves to demonstrate proper concentration ranges from minimal to optimal binding. Maximal binding (Bmax) was determined (FIG. 8) using Scatchard evaluation and the respective KDs were calculated. Values depicted in Table 4 were derived from two independent experiments per BCMA/CD3 bispecific antibody.

[0442] Cell based Scatchard analysis confirmed that the BCMA/CD3 bispecific antibodies of the epitope cluster E3 are subnanomolar in affinity to human BCMA and present with a small interspecies BCMA affinity gap of below five.

TABLE 4
Affinities (KD) of BCMA/CD3 bispecific antibodies of the epitope cluster
E3 from cell based Scatchard analysis (two independent experiments each)
with the calculated affinity gap KD macaque BCMA/KD human BCMA.

| BCMA/CD3 | KD [nM] | KD [nM] | x-fold KD |
|---|---|---|---|
| bispecific | human | macaque | difference KD ma |
| antibody | BCMA | BCMA | vs. KD hu BCMA |
| BCMA-83 | 0.40 ± 0.13 | 1.22 ± 0.25 | 3.1 |
| BCMA-98 | 0.74 ± 0.02 | 1.15 ± 0.64 | 1.6 |
| BCMA-71 | 0.78 ± 0.07 | 3.12 ± 0.26 | 4.0 |
| BCMA-34 | 0.77 ± 0.11 | 0.97 ± 0.33 | 1.3 |
| BCMA-74 | 0.67 ± 0.03 | 0.95 ± 0.06 | 1.4 |
| BCMA-20 | 0.78 ± 0.10 | 0.85 ± 0.01 | 1.1 |

### Example 8

### Cytotoxic Activity

[0443] 8.1 Chromium Release Assay with Stimulated Human T Cells

[0444] Stimulated T cells enriched for CD8⁺ T cells were obtained as described below.

[0445] A petri dish (145 mm diameter, Greiner bio-one GmbH, Kremsmünster) was coated with a commercially available anti-CD3 specific antibody (OKT3, Orthoclone) in a final concentration of 1 μg/ml for 1 hour at 37° C. Unbound protein was removed by one washing step with PBS. 3-5×10⁷ human PBMC were added to the precoated petri dish in 120 ml of RPMI 1640 with stabilized glutamine/10% FCS/IL-2 20 U/ml (Proleukin®, Chiron) and stimulated for 2 days. On the third day, the cells were collected and washed once with RPMI 1640. IL-2 was added to a final concentration of 20 U/ml and the cells were cultured again for one day in the same cell culture medium as above.

[0446] CD8⁺ cytotoxic T lymphocytes (CTLs) were enriched by depletion of CD4⁺ T cells and CD56⁺ NK cells using Dynal-Beads according to the manufacturer's protocol.

[0447] Macaque or human BCMA-transfected CHO target cells were washed twice with PBS and labeled with 11.1 MBq ⁵¹Cr in a final volume of 100 μl RPMI with 50% FCS for 60 minutes at 37° C. Subsequently, the labeled target cells were washed 3 times with 5 ml RPMI and then used in the cytotoxicity assay. The assay was performed in a 96-well plate in a total volume of 200 μl supplemented RPMI with an E:T ratio of 10:1. A starting concentration of 0.01-1 μg/ml of purified bispecific antibody and threefold dilutions thereof were used. Incubation time for the assay was 18 hours. Cytotoxicity was determined as relative values of released chromium in the supernatant relative to the difference of maximum lysis (addition of Triton-X) and spontaneous lysis (without effector cells). All measurements were carried out in quadruplicates. Measurement of chromium activity in the supernatants was performed in a Wizard 3″ gammacounter (Perkin Elmer Life Sciences GmbH, Köln, Germany). Analysis of the results was carried out with Prism 5 for Windows (version 5.0, GraphPad Software Inc., San Diego, Calif., USA). EC50 values calculated by the analysis program from the sigmoidal dose response curves were used for comparison of cytotoxic activity (see FIG. 5).

### 8.2 Potency of Redirecting Stimulated Human Effector T Cells Against Human BCMA-Transfected CHO Cells

[0448] The cytotoxic activity of BCMA/CD3 bispecific antibodies was analyzed in a 51-chromium (⁵¹Cr) release cytotoxicity assay using CHO cells transfected with human BCMA as target cells, and stimulated enriched human CD8 T cells as effector cells. The experiment was carried out as described in Example 8.1.

[0449] All BCMA/CD3 bispecific antibodies of epitope cluster E3 showed very potent cytotoxic activity against human BCMA transfected CHO cells with EC50-values in the 1-digit pg/ml range or even below (FIG. 9 and Table 5). So the epitope cluster E3 presents with a very favorable epitope-activity relationship supporting very potent bispecific antibody mediated cytotoxic activity.

TABLE 5
EC50 values [pg/ml] of BCMA/CD3 bispecific antibodies of the
epitope cluster E3analyzed in a 51-chromium (⁵¹Cr) release cytotoxicity
assay using CHO cells transfected with human BCMA as target cells,
and stimulated enriched human CD8 T cells as effector cells.

| BCMA/CD3 bispecific antibody | EC50 [pg/ml] | R square value |
|---|---|---|
| BCMA-83 | 0.38 | 0.79 |
| BCMA-98 | 0.27 | 0.85 |
| BCMA-71 | 3.2 | 0.85 |
| BCMA-34 | 3.4 | 0.81 |
| BCMA-74 | 0.73 | 0.80 |
| BCMA-20 | 0.83 | 0.82 |

8.3 FACS-Based Cytotoxicity Assay with Unstimulated Human PBMC

### Isolation of Effector Cells

[0450] Human peripheral blood mononuclear cells (PBMC) were prepared by Ficoll density gradient centrifugation from enriched lymphocyte preparations (buffy coats), a side product of blood banks collecting blood for transfusions. Buffy coats were supplied by a local blood bank and PBMC were prepared on the same day of blood collection. After Ficoll density centrifugation and extensive washes with Dulbecco's PBS (Gibco), remaining erythrocytes were removed from PBMC via incubation with erythrocyte lysis buffer (155 mM NH₄Cl, 10 mM KHCO₃, 100 μM EDTA). Platelets were removed via the supernatant upon centrifugation of PBMC at 100×g. Remaining lymphocytes mainly encompass B and T lymphocytes, NK cells and monocytes. PBMC were kept in culture at 37° C./5% CO₂ in RPMI medium (Gibco) with 10% FCS (Gibco).

### Depletion of CD14⁺ and CD56⁺ Cells

[0451] For depletion of CD14⁺ cells, human CD14 MicroBeads (Milteny Biotec, MACS, #130-050-201) were used, for depletion of NK cells human CD56 MicroBeads (MACS, #130-050-401). PBMC were counted and centrifuged for 10 min at room temperature with 300×g. The supernatant was discarded and the cell pellet resuspended in MACS isolation buffer [80 μL/10⁷ cells; PBS (Invitrogen, #20012-043), 0.5% (v/v) FBS (Gibco, #10270-106), 2 mM EDTA (Sigma-Aldrich, #E-6511)]. CD14 MicroBeads and CD56 MicroBeads (20 μL/10⁷ cells) were added and incubated for 15 min at 4-8° C. The cells were washed with MACS isolation buffer (1-2 mL/10⁷ cells). After centrifugation (see above), supernatant was discarded and cells resuspended in MACS isolation buffer (500 μL/10⁸ cells). CD14/CD56 negative cells were then isolated using LS Columns (Miltenyi Biotec, #130-042-401). PBMC w/o CD14+/CD56+ cells were cultured in RPMI complete medium i.e. RPMI1640 (Biochrom AG, #FG1215) supplemented with 10% FBS (Biochrom AG, #S0115), 1× non-essential amino acids (Biochrom AG, #K0293), 10 mM Hepes buffer (Biochrom AG, #L1613), 1 mM sodium pyruvate (Biochrom AG, #L0473) and 100 U/mL penicillin/streptomycin (Biochrom AG, #A2213) at 37° C. in an incubator until needed.

### Target Cell Labeling

[0452] For the analysis of cell lysis in flow cytometry assays, the fluorescent membrane dye DiOC₁₈ (DiO) (Molecular Probes, #V22886) was used to label human BCMA- or macaque BCMA-transfected CHO cells as target cells and distinguish them from effector cells. Briefly, cells were harvested, washed once with PBS and adjusted to 10⁶ cell/mL in PBS containing 2% (v/v) FBS and the membrane dye DiO (5 μL/10⁶ cells). After incubation for 3 min at 37° C., cells were washed twice in complete RPMI medium and the cell number adjusted to 1.25×10⁵ cells/mL. The vitality of cells was determined using 0.5% (v/v) isotonic EosinG solution (Roth, #45380).

### Flow Cytometry Based Analysis

[0453] This assay was designed to quantify the lysis of macaque or human BCMA-transfected CHO cells in the presence of serial dilutions of BCMAbispecific antibodies.

[0454] Equal volumes of DiO-labeled target cells and effector cells (i.e., PBMC w/o CD14⁺ cells) were mixed, resulting in an E:T cell ratio of 10:1. 160 μL of this suspension were transferred to each well of a 96-well plate. 40 μL of serial dilutions of the BCMAbispecific antibodies and a negative control bispecific (an CD3-based bispecific antibody recognizing an irrelevant target antigen) or RPMI complete medium as an additional negative control were added. The bispecific antibody-mediated cytotoxic reaction proceeded for 48 hours in a 7% CO₂ humidified incubator. Then cells were transferred to a new 96-well plate and loss of target cell membrane integrity was monitored by adding propidium iodide (PI) at a final concentration of 1 μg/mL. PI is a membrane impermeable dye that normally is excluded from viable cells, whereas dead cells take it up and become identifiable by fluorescent emission.

[0455] Samples were measured by flowcytometry on a FACSCanto II instrument and analyzed by FACSDiva software (both from Becton Dickinson).

[0456] Target cells were identified as DiO-positive cells. PI-negative target cells were classified as living target cells. Percentage of cytotoxicity was calculated according to the following formula:

$$Cytotoxicity [ \% ] = \frac{{n}_{dead target cells}}{{n}_{target cells}} \times 100$$

$$n = number of events$$

[0457] Using GraphPad Prism 5 software (Graph Pad Software, San Diego), the percentage of cytotoxicity was plotted against the corresponding bispecific antibody concentrations. Dose response curves were analyzed with the four parametric logistic regression models for evaluation of sigmoid dose response curves with fixed hill slope and EC50 values were calculated.

### 8.4 Unstimulated Human PBMC Against Human BCMA-Transfected Target Cells

[0458] The cytotoxic activity of BCMA/CD3 bispecific antibodies was analyzed in a FACS-based cytotoxicity assay using CHO cells transfected with human BCMA as target cells, and unstimulated human PBMC as effector cells. The assay was carried out as described above (Example 8.3).

[0459] The results of the FACS-based cytotoxicity assays with unstimulated human PBMC as effector cells and human BCMA-transfected CHO cells as targets are shown in FIG. 10 and Table 6.

TABLE 6
EC50 values [pg/ml] of BCMA/CD3 bispecific antibodies
of epitope cluster E3 asmeasured in a 48-hour FACS-based
cytotoxicity assay with unstimulated human PBMC as effector
cells and CHO cells transfected with human BCMA as target cells.

| BCMA/CD3 bispecific antibody | EC50 [pg/ml] | R square value |
|---|---|---|
| BCMA-83 | 212 | 0.97 |
| BCMA-7 | 102 | 0.97 |
| BCMA-5 | 58.4 | 0.94 |
| BCMA-98 | 53.4 | 0.95 |
| BCMA-71 | 208 | 0.94 |
| BCMA-34 | 149 | 0.94 |
| BCMA-74 | 125 | 0.97 |
| BCMA-20 | 176 | 0.98 |

### Example 9

[0460] 9.1 Exclusion of Cross-Reactivity with BAFF-Receptor

[0461] For flow cytometry, 200,000 cells of the respective cell lines were incubated for 30 min on ice with 50 μl of purified bispecific molecules at a concentration of 5 μg/ml. The cells were washed twice in PBS with 2% FCS and binding of the constructs was detected with a murine PentaHis antibody (Qiagen; diluted 1:20 in 50 μl PBS with 2% FCS). After washing, bound PentaHis antibodies were detected with an Fc gamma-specific antibody (Dianova) conjugated to phycoerythrin, diluted 1:100 in PBS with 2% FCS. Samples were measured by flow cytometry on a FACSCanto II instrument and analyzed by FACSDiva software (both from Becton Dickinson). The bispecific binders were shown to not be cross-reactive with BAFF receptor.

9.2 Exclusion of BCMA/CD3 Bispecific Antibody Cross-Reactivity with Human BAFF-Receptor (BAFF-R) and TACI

[0462] For exclusion of binding to human BAFF-R and TACI, BCMA/CD3 bispecific antibodies were tested by flow cytometry using CHO cells transfected with human BAFF-R and TACI, respectively. Moreover, L363 multiple myeloma cells were used as positive control for binding to human BCMA. Expression of BAFF-R and TACI antigen on CHO cells was confirmed by two positive control antibodies. Flow cytometry was performed as described in the previous example.

[0463] Flow cytometric analysis confirmed that none of the BCMA/CD3 bispecific antibodies of the epitope cluster E3 cross-reacts with human BAFF-R or human TACI (see FIG. 11).

### Example 10

### Cytotoxic Activity

[0464] The potency of human-like BCMAbispecific antibodies in redirecting effector T cells against BCMA-expressing target cells is analyzed in five additional in vitro cytotoxicity assays:

1. The potency of BCMAbispecific antibodies in redirecting stimulated human effector T cells against aBCMA-positive (human) tumor cell line is measured in a 51-chromium release assay.
2. The potency of BCMAbispecific antibodies in redirecting the T cells in unstimulated human PBMC against human BCMA-transfected CHO cells is measured in a FACS-based cytotoxicity assay.
3. The potency of BCMAbispecific antibodies in redirecting the T cells in unstimulated human PBMC against aBCMA-positive (human) tumor cell line is measured in a FACS-based cytotoxicity assay.
4. For confirmation that the cross-reactive BCMAbispecific antibodies are capable of redirecting macaque T cells against macaque BCMA-transfected CHO cells, a FACS-based cytotoxicity assay is performed with a macaque T cell line as effector T cells.
5. The potency gap between monomeric and dimeric forms of BCMAbispecific antibodies is determined in a 51-chromium release assay using human BCMA-transfected CHO cells as target cells and stimulated human T cells as effector cells.

### Example 11

### Stimulated Human T Cells Against the BCMA-Positive Human Multiple Myeloma Cell Line L363

[0465] The cytotoxic activity of BCMA/CD3 bispecific antibodies was analyzed in a 51-chromium (⁵¹Cr) release cytotoxicity assay using the BCMA-positive human multiple myeloma cell line L363 (DSMZ No. ACC49) as source of target cells, and stimulated enriched human CD8 T cells as effector cells. The assay was carried out as described in Example 8.1.

[0466] In accordance with the results of the 51-chromium release assays with stimulated enriched human CD8 T lymphocytes as effector cells and human BCMA-transfected CHO cells as targets, BCMA/CD3 bispecific antibodies of epitope cluster E3 are very potent in cytotoxic activity (FIG. 12 and Table 7).

[0467] Another group of antibodies was identified during epitope clustering (see Examples 1 and 3), which is capable of binding to epitope clusters 1 and 4 of BCMA (“E1/E4”). Unexpectedly, BCMA/CD3 bispecific antibodies of epitope cluster E1/E4—although potent in cytotoxic activity against CHO cell transfected with human BCMA—proved to be rather weakly cytotoxic against the human multiple myeloma cell line L363 expressing native BCMA at low density on the cell surface (FIG. 12 and Table 7). Without wishing to be bound by theory, the inventors believe that the E1/E4 epitope of human BCMA might be less well accessible on natural BCMA expressers than on BCMA-transfected cells.

TABLE 7
EC50 values [pg/ml] of BCMA/CD3 bispecific antibodies of epitope
clusters E1/E4 (rows 1 and 2) and E3 (rows 3 to 8) analyzed in an
18-hour 51-chromium (⁵¹Cr) release cytotoxicity assay with the BCMA-
positive human multiple myeloma cell line L363 as source of target
cells, and stimulated enriched human CD8 T cells as effector cells.

| | BCMA/CD3 bispecific antibody | EC50 [pg/ml] | R square value |
|---|---|---|---|
| 1 | BCMA-54 | 685 | 0.84 |
| 2 | BCMA-53 | 1107 | 0.82 |
| 3 | BCMA-83 | 28 | 0.83 |
| 4 | BCMA-98 | 10 | 0.81 |
| 5 | BCMA-71 | 125 | 0.86 |
| 6 | BCMA-34 | 42 | 0.81 |
| 7 | BCMA-74 | 73 | 0.79 |
| 8 | BCMA-20 | 21 | 0.85 |

### Example 12

### Unstimulated Human PBMC Against the BCMA-Positive Human Multiple Myeloma Cell Line L363

[0468] The cytotoxic activity of BCMA/CD3 bispecific antibodies was furthermore analyzed in a FACS-based cytotoxicity assay using the BCMA-positive human multiple myeloma cell line L363 (DSMZ, ACC49)—showing the weakest surface expression of native BCMA of all tested target T cell lines—as source of target cells and unstimulated human PBMC as effector cells. The assay was carried out as described above (Example 8.3).

[0469] As observed in the 51-chromium release assay with stimulated enriched human CD8

[0470] T lymphocytes against the human multiple myeloma cell line L363, the BCMA/CD3 bispecific antibodies of epitope cluster E1/E4—in contrast to their potent cytotoxic activity against CHO cell transfected with human BCMA—proved to be again less potent in redirecting the cytotoxic activity of unstimulated PBMC against the human multiple myeloma cell line L363 expressing native BCMA at low density on the cell surface. This is in line with the theory provided hereinabove, i.e., the E1/E4 epitope of human BCMA may be less well accessible on natural BCMA expressers than on BCMA-transfected cells. BCMA/CD3 bispecific antibodies of the epitope cluster E3 presented with 3-digit pg/ml EC50-values in this assay (see FIG. 13 and Table 8).

TABLE 8
EC50 values [pg/ml] of BCMA/CD3 bispecific antibodies of
epitope clusters E1/E4 (rows 1 and 2) and E3 (rows 3 to 8) as
measured in a 48-hour FACS-based cytotoxicity assay with
unstimulated human PBMC as effector cells and the human
multiple myeloma cell line L363 as source of target cells.

| | BCMA/CD3 bispecific antibody | EC50 [Pg/ml] | R square value |
|---|---|---|---|
| 1 | BCMA-54 | 3162 | 0.99 |
| 2 | BCMA-53 | 2284 | 0.98 |
| 3 | BCMA-83 | 241 | 0.99 |
| 4 | BCMA-98 | 311 | 0.99 |
| 5 | BCMA-71 | 284 | 0.99 |
| 6 | BCMA-34 | 194 | 0.99 |
| 7 | BCMA-74 | 185 | 0.99 |
| 8 | BCMA-20 | 191 | 0.99 |

[0471] Expectedly, EC50-values were higher in cytotoxicity assays with unstimulated PBMC as effector cells than in cytotoxicity assays using enriched stimulated human CD8 T cells.

### Example 13

### Unstimulated Human PBMC Against the BCMA-Positive Human Multiple Myeloma Cell Line NCI-H929

[0472] The cytotoxic activity of BCMA/CD3 bispecific antibodies was analyzed in a FACS-based cytotoxicity assay using the BCMA-positive human multiple myeloma cell line NCI-H929 (ATCC CRL-9068) as source of target cells and unstimulated human PBMC as effector cells. The assay was carried out as described above (Example 8.3).

[0473] The results of this assay with another human multiple myeloma cell line (i.e. NCI-H929) expressing native BCMA on the cell surface confirm those obtained with human multiple myeloma cell line L363. Again, BCMA/CD3 bispecific antibodies of epitope cluster E1/E4—in contrast to their potent cytotoxic activity against CHO cell transfected with human BCMA—proved to be less potent in redirecting the cytotoxic activity of unstimulated PBMC against human multiple myeloma cells confirming the theory that the E1/E4 epitope of human BCMA may be less well accessible on natural BCMA expressers than on BCMA-transfected cells. Such an activity gap between BCMA-transfected target cells and natural expressers as seen for the E1/E4 binders was not found for the E3. BCMA/CD3 bispecific antibodies of the epitope cluster E3 presented with 2- to 3-digit pg/ml EC50-values and hence redirected unstimulated PBMC against NCI-H929 target cells with very good EC50-values (see FIG. 14 and Table 9).

TABLE 9
EC50 values [pg/ml] of BCMA/CD3 bispecific antibodies
of epitope clusters E1/E4 (rows 1 and 2) and E3 (rows 3 to 8) as
measured in a 48-hour FACS-based cytotoxicity assay with
unstimulated human PBMC as effector cells and the human multiple
myeloma cell line NCI-H929 as source of target cells.

| | BCMA/CD3 bispecific antibody | EC50 [pg/ml] | R square value |
|---|---|---|---|
| 1 | BCMA-54 | 2604 | 0.99 |
| 2 | BCMA-53 | 2474 | 0.99 |
| 3 | BCMA-83 | 154 | 0.93 |
| 4 | BCMA-98 | 67.6 | 0.87 |
| 5 | BCMA-71 | 50.7 | 0.96 |
| 6 | BCMA-34 | 227 | 0.99 |
| 7 | BCMA-74 | 103 | 0.97 |
| 8 | BCMA-20 | 123 | 0.97 |

[0474] As expected, EC50-values were lower with the human multiple myeloma cell line NCI-H929, which expresses higher levels of BCMA on the cell surface compared to L363.

### Example 14

### Macaque T Cells Against Macaque BCMA-Expressing Target Cells

[0475] Finally, the cytotoxic activity of BCMA/CD3 bispecific antibodies was analyzed in a FACS-based cytotoxicity assay using CHO cells transfected with macaque BCMA as target cells, and a macaque T cell line as source of effector cells.

[0476] The macaque T cell line 4119LnPx (Knappe et al. Blood 95:3256-61 (2000)) was used as source of effector cells. Target cell labeling of macaque BCMA-transfected CHO cells and flow cytometry based analysis of cytotoxic activity was performed as described above.

[0477] Macaque T cells from cell line 4119LnPx were induced to efficiently kill macaque BCMA-transfected CHO cells by BCMA/CD3 bispecific antibodies of the E3 epitope cluster. The antibodies presented very potently with 1-digit to low 2-digit pg/ml EC50-values in this assay, confirming that these antibodies are very active in the macaque system. On the other hand, BCMA/CD3 bispecific antibodies of the epitope cluster E1/E4 showed a significantly weaker potency with EC50-values in the 2-digit to 3-digit pg/ml range (see FIG. 15 and Table 10). The E3 specific antibodies are hence about 3 to almost 100 times more potent in the macaque system.

TABLE 10
EC50 values [pg/ml] of BCMA/CD3 bispecific antibodies of
epitope clusters E1/E4 (rows 1 and 2) and E3 (rows 3 to 8) as
measured in a 48-hour FACS-based cytotoxicity assay with
macaque T cell line 4119LnPx as effector cells and CHO cells
transfected with macaque BCMA as target cells.

| | BCMA/CD3 bispecific antibody | EC50 [pg/ml] | R square value |
|---|---|---|---|
| 1 | BCMA-54 | 78.5 | 0.98 |
| 2 | BCMA-53 | 183 | 0.96 |
| 3 | BCMA-83 | 10.9 | 0.97 |
| 4 | BCMA-98 | 2.5 | 0.89 |
| 5 | BCMA-71 | 3.2 | 0.97 |
| 6 | BCMA-34 | 2.1 | 0.95 |
| 7 | BCMA-74 | 2.0 | 0.95 |
| 8 | BCMA-20 | 26 | 0.98 |

### Example 15

### Potency Gap Between BCMA/CD3 Bispecific Antibody Monomer and Dimer

[0478] In order to determine the difference in cytotoxic activity between the monomeric and the dimeric isoform of individual BCMA/CD3 bispecific antibodies (referred to as potency gap), a 51-chromium release cytotoxicity assay as described hereinabove (Example 8.1) was carried out with purified BCMA/CD3 bispecific antibody monomer and dimer. The potency gap was calculated as ratio between EC50 values of the bispecific antibody's monomer and dimer. Potency gaps of the tested BCMA/CD3 bispecific antibodies of the epitope cluster E3 were between 0.03 and 1.2. There is hence no substantially more active dimer compared to its respective monomer.

### Example 16

### Monomer to Dimer Conversion after Three Freeze/Thaw Cycles

[0479] Bispecific BCMA/CD3 antibody monomer were subjected to three freeze/thaw cycles followed by high performance SEC to determine the percentage of initially monomeric antibody, which had been converted into antibody dimer.

[0480] 15 μg of monomeric antibody were adjusted to a concentration of 250 μg/ml with generic buffer and then frozen at −80° C. for 30 min followed by thawing for 30 min at room temperature. After three freeze/thaw cycles the dimer content was determined by HP-SEC. To this end, 15 μg aliquots of the monomeric isoforms of the antibodies were thawed and equalized to a concentration of 250 μg/ml in the original SEC buffer (10 mM citric acid—75 mM lysine HCl—4% trehalose—pH 7.2) followed by incubation at 37° C. for 7 days. A high resolution SEC Column TSK Gel G3000 SWXL (Tosoh, Tokyo-Japan) was connected to an Åkta Purifier 10 FPLC (GE Lifesciences) equipped with an A905 Autosampler. Column equilibration and running buffer consisted of 100 mM KH2PO4-200 mM Na2SO4 adjusted to pH 6.6. After 7 days of incubation, the antibody solution (15 μg protein) was applied to the equilibrated column and elution was carried out at a flow rate of 0.75 ml/min at a maximum pressure of 7 MPa. The whole run was monitored at 280, 254 and 210 nm optical absorbance. Analysis was done by peak integration of the 210 nm signal recorded in the Åkta Unicorn software run evaluation sheet. Dimer content was calculated by dividing the area of the dimer peak by the total area of monomer plus dimer peak.

[0481] The BCMA/CD3 bispecific antibodies of the epitope cluster E3 presented with dimer percentages of 0.7 to 1.1% after three freeze/thaw cycles, which is considered good. However, the dimer conversion rates of BCMA/CD3 bispecific antibodies of the epitope cluster E1/E4 reached unfavorably high values, exceeding the threshold to disadvantageous dimer values of ≧2.5% (4.7% and 3.8%, respectively), see Table 11.

TABLE 11
Percentage of monomeric versus dimeric BCMA/CD3
bispecific antibodies of epitope clusters E1/E4 (rows 1 and 2)
and E3 (rows 3 to 8) after three freeze/thaw cycles as determined
by High Performance Size Exclusion Chromatography (HP-SEC).

| | BCMA/CD3 bispecific antibody | Monomer [%] | Dimer [%] |
|---|---|---|---|
| 1 | BCMA-54 | 95.3 | 4.7 |
| 2 | BCMA-53 | 96.2 | 3.8 |
| 3 | BCMA-83 | 99.1 | 0.9 |
| 4 | BCMA-98 | 99.1 | 0.9 |
| 5 | BCMA-71 | 99.1 | 0.9 |
| 6 | BCMA-34 | 98.9 | 1.1 |
| 7 | BCMA-74 | 99.3 | 0.7 |
| 8 | BCMA-20 | 99.2 | 0.8 |

### Example 17

### Thermostability

[0482] Temperature melting curves were determined by Differential Scanning calorimetry (DSC) to determine intrinsic biophysical protein stabilities of the BCMA/CD3 bispecific antibodies. These experiments were performed using a MicroCal LLC (Northampton, Mass., U.S.A) VP-DSC device. The energy uptake of a sample containing BCMA/CD3 bispecific antibody was recorded from 20 to 90° C. compared to a sample which just contained the antibody's formulation buffer.

[0483] In detail, BCMA/CD3 bispecific antibodies were adjusted to a final concentration of 250 μg/ml in storage buffer. 300 μl of the prepared protein solutions were transferred into a deep well plate and placed into the cooled autosampler rack position of the DSC device. Additional wells were filled with the SEC running buffer as reference material for the measurement. For the measurement process the protein solution was transferred by the autosampler into a capillary. An additional capillary was filled with the SEC running buffer as reference. Heating and recording of required heating energy to heat up both capillaries at equal temperature ranging from 20 to 90° C. was done for all samples.

[0484] For recording of the respective melting curve, the overall sample temperature was increased stepwise. At each temperature T energy uptake of the sample and the formulation buffer reference was recorded. The difference in energy uptake Cp (kcal/mole/° C.) of the sample minus the reference was plotted against the respective temperature. The melting temperature is defined as the temperature at the first maximum of energy uptake.

[0485] All tested BCMA/CD3 bispecific antibodies of the epitope cluster E3 showed favorable thermostability with melting temperatures above 60° C., more precisely between 61.62° C. and 63.05° C.

### Example 18

### Exclusion of Plasma Interference by Flow Cytometry

[0486] To determine potential interaction of BCMA/CD3 bispecific antibodies with human plasma proteins, a plasma interference test was established. To this end, 10 μg/ml of the respective BCMA/CD3 bispecific antibodies were incubated for one hour at 37° C. in 90% human plasma. Subsequently, the binding to human BCMA expressing CHO cells was determined by flow cytometry.

[0487] For flow cytometry, 200,000 cells of the respective cell lines were incubated for 30 min on ice with 50 μl of purified antibody at a concentration of 5 μg/ml. The cells were washed twice in PBS/2% FCS and binding of the constructs was detected with a murine PentaHis antibody (Qiagen; diluted 1:20 in 50 μl PBS/2% FCS). After washing, bound PentaHis antibodies were detected with an Fc gamma-specific antibody (Dianova) conjugated to phycoerythrin, diluted 1:100 in PBS/2% FCS. Samples were measured by flow cytometry on a FACSCanto II instrument and analyzed by FACSDiva software (both from Becton Dickinson).

[0488] The obtained data were compared with a control assay using PBS instead of human plasma. Relative binding was calculated as follows:

(signal PBS sample/signal w/o detection agent)/(signal plasma sample/signal w/o detection agent).

[0489] In this experiment it became obvious that there was no significant reduction of target binding of the respective BCMA/CD3 bispecific antibodies of the epitope cluster E3 mediated by plasma proteins. The relative plasma interference value was below a value of 2 in all cases, more precisely between 1.29±0.25 and 1.70±0.26 (with a value of “2” being considered as lower threshold for interference signals).

### Example 19

### Therapeutic Efficacy of BCMA/CD3 Bispecific Antibodies in Human Tumor Xenograft Models

[0490] On day 1 of the study, 5×10⁶ cells of the human cancer cell line NCI-H929 were subcutaneously injected in the right dorsal flank offemale NOD/SCID mice.

[0491] On day 9, when the mean tumor volume had reached about 100 mm³, in vitro expanded human CD3⁺ T cells were transplanted into the mice by injection of about 2×10⁷ cells into the peritoneal cavity of the animals. Mice of vehicle control group 1 (n=5) did not receive effector cells and were used as an untransplanted control for comparison with vehicle control group 2 (n=10, receiving effector cells) to monitor the impact of T cells alone on tumor growth.

[0492] The antibody treatment started on day 13, when the mean tumor volume had reached about 200 mm³. The mean tumor size of each treatment group on the day of treatment start was not statistically different from any other group (analysis of variance). Mice were treated with 0.5 mg/kg/day of the BCMA/CD3 bispecific antibodies BCMA-98×CD3 (group 3, n=7) or BCMA-34×CD3 (group 4, n=6) by intravenous bolus injection for 17 days.

[0493] Tumors were measured by caliper during the study and progress evaluated by intergroup comparison of tumor volumes (TV). The tumor growth inhibition T/C [%] was determined by calculating TV as T/C %=100× (median TV of analyzed group)/(median TV of control group 2). The results are shown in Table 12 and FIG. 16.

TABLE 12
Median tumor volume (TV) and tumor growth inhibition (T/C) at days 13 to 30.

| Dose | | | | | | | | | | | | |
|---|---|---|---|---|---|---|---|---|---|---|---|---|
| group | Data | d13 | d14 | d15 | d16 | d18 | d19 | d21 | d23 | d26 | d28 | d30 |
| 1 Vehi. | med.TV | 238 | 288 | 395 | 425 | 543 | 632 | 863 | 1067 | 1116 | 1396 | 2023 |
| control | [mm³] | | | | | | | | | | | |
| w/o | T/C [%] | 120 | 123 | 127 | 118 | 104 | 114 | 122 | 113 | 87 | 85 | 110 |
| T cells | | | | | | | | | | | | |
| 2 | med.TV | 198 | 235 | 310 | 361 | 525 | 553 | 706 | 942 | 1290 | 1636 | 1839 |
| Vehicle | [mm³] | | | | | | | | | | | |
| control | T/C [%] | 100 | 100 | 100 | 100 | 100 | 100 | 100 | 100 | 100 | 100 | 100 |
| 3 | med.TV | 207 | 243 | 248 | 235 | 164 | 137 | 93.5 | 46.2 | 21.2 | 0.0 | 0.0 |
| BCMA- | [mm³] | | | | | | | | | | | |
| 98 | T/C [%] | 105 | 104 | 79.7 | 65.0 | 31.2 | 24.7 | 13.2 | 4.9 | 1.6 | 0.0 | 0.0 |
| 4 | med.TV | 206 | 233 | 212 | 189 | 154 | 119 | 56.5 | 17.4 | 0.0 | 0.0 | 0.0 |
| BCMA- | [mm³] | | | | | | | | | | | |
| 34 | T/C [%] | 104 | 99.2 | 68.2 | 52.3 | 29.4 | 21.5 | 8.0 | 1.8 | 0.0 | 0.0 | 0.0 |

### Example 20

### Exclusion of Lysis of Target Negative Cells

[0494] An in vitro lysis assay was carried out using the BCMA-positive human multiple myeloma cell line NCI-H929 and purified T cells at an effector to target cell ratio of 5:1 and with an incubation time of 24 hours. BCMA/CD3 bispecific antibodies of epitope cluster E3 (BCMA-34 and BCMA-98) showed high potency and efficacy in the lysis of NCI-H929. However, no lysis was detected in the BCMA negative cell lines HL60 (AML/myeloblast morphology), MES-SA (uterus sarcoma, fibroblast morphology), and SNU-16 (stomach carcinoma, epithelial morphology) for up to 500 nM of the respective antibody.

### Example 21

### Induction of T Cell Activation of Different PBMC Subsets

[0495] A FACS-based cytotoxicity assay (48 h; E:T=10:1) was carried out using human multiple myeloma cell lines NCI-H929, L-363 and OPM-2 as target cells and different subsets of human PBMC(CD4⁺/CD8⁺/CD25⁺/CD69⁺) as effector cells. The results (see Table 13) show that the degree of activation, as measured by the EC₅₀ value, is essentially in the same range for the different analyzed PBMC subsets.

TABLE 13
EC50 values [ng/ml] of BCMA/CD3 bispecific antibodies of epitope
cluster E3 as measured in a 48-hour FACS-based cytotoxicity assay
with different subsets of human PBMC as effector cells and different
human multiple myeloma cell lines as target cells.

| | | | EC₅₀ [ng/ml] |
|---|---|---|---|
| Cell line | PBMC | BCMA-98 × CD3 | BCMA-34 × CD3 |
| NCI-H929 | CD4⁺/CD25⁺ | 1.46 | 1.20 |
| | CD8⁺/CD25⁺ | 0.53 | 0.49 |
| | CD4⁺/CD69⁺ | 0.59 | 0.47 |
| | CD8⁺/CD69⁺ | 0.21 | 0.21 |
| OPM-2 | CD4⁺/CD25⁺ | 2.52 | 4.88 |
| | CD8⁺/CD25⁺ | 1.00 | 1.20 |
| | CD4⁺/CD69⁺ | 1.65 | 2.27 |
| | CD8⁺/CD69⁺ | 0.48 | 0.42 |
| L-363 | CD4⁺/CD25⁺ | 0.54 | 0.62 |
| | CD8⁺/CD25⁺ | 0.24 | 0.28 |
| | CD4⁺/CD69⁺ | 0.35 | 0.34 |
| | CD8⁺/CD69⁺ | 0.12 | 0.11 |

### Example 22

### Induction of Cytokine Release

[0496] A FACS-based cytotoxicity assay (48 h; E:T=10:1) was carried out using human multiple myeloma cell lines NCI-H929, L-363 and OPM-2 as target cells and human PBMC as effector cells. The levels of cytokine release [pg/ml] were determined at increasing concentrations of BCMA/CD3 bispecific antibodies of epitope cluster E3. The following cytokines were analyzed: II-2, IL-6, IL-10, TNF and IFN-gamma. The results are shown in Table 14 and FIG. 17.

TABLE 14
Release of IL-2, IL-6, IL-10, TNF and IFN-gamma [pg/ml]
induced by 2.5 μg/ml of BCMA/CD3 bispecific antibodies of epitope
cluster E3 (BCMA-98 and BCMA-34) in a 48-hour FACS-based
cytotoxicity assay with human PBMC as effector cells and different
human multiple myeloma cell lines as target cells (E:T = 10:1).

| | IL-2 | IL-6 | IL-10 | TNF | IFN-gamma |
|---|---|---|---|---|---|
| | Cytokine levels [pg/m1] | | | | |
| | NCI-H929 | | | | |
| BCMA-98 | 1357 | 699 | 2798 | 10828 | 73910 |
| BCMA-34 | 1327 | 631 | 3439 | 6675 | 77042 |
| | OPM-2 | | | | |
| BCMA-98 | 41 | 118 | 990 | 5793 | 33302 |
| BCMA-34 | 28 | 109 | 801 | 4913 | 23214 |
| | L-363 | | | | |
| BCMA-98 | 97 | 314 | 2433 | 5397 | 64981 |
| BCMA-34 | 168 | 347 | 2080 | 5930 | 75681 |

The application's sequence listing, which the Patent Office published only in electronic form, follows.

SEQUENCE LISTING (1093 sequences)

SEQ ID NO: 1 - protein, 5 aa, artificial
  VH CDR1 of BCMA-1
NYDMA

SEQ ID NO: 2 - protein, 17 aa, artificial
  VH CDR2 of BCMA-1
SIITSGDATYYRDSVKG

SEQ ID NO: 3 - protein, 12 aa, artificial
  VH CDR3 of BCMA-1
HDYYDGSYGFAY

SEQ ID NO: 4 - protein, 11 aa, artificial
  VL CDR1 of BCMA-1
KASQSVGINVD

SEQ ID NO: 5 - protein, 7 aa, artificial
  VL CDR2 of BCMA-1
GASNRHT

SEQ ID NO: 6 - protein, 9 aa, artificial
  VL CDR3 of BCMA-1
LQYGSIPFT

SEQ ID NO: 7 - protein, 121 aa, artificial
  VH of BCMA-1
QVQLVESGGGVVQPGRSLRLSCAASGFTFSNYDMAWVRQAPGKGLEWVASIITSGDATYYRDSVKGRFTISRDNSKNTLYLQMNSLRAEDTAVYYCVRHDYYDGSYGFAYWGQGTLVTVSS

SEQ ID NO: 8 - protein, 107 aa, artificial
  VL of BCMA-1
EIVMTQSPATLSVSPGERVTLSCKASQSVGINVDWYQQKPGQAPRLLIYGASNRHTGIPARFSGSGSGREFTLTISSLQSEDFAVYYCLQYGSIPFTFGPGTKVDIK

SEQ ID NO: 9 - protein, 243 aa, artificial
  BCMA-1 scFv
QVQLVESGGGVVQPGRSLRLSCAASGFTFSNYDMAWVRQAPGKGLEWVASIITSGDATYYRDSVKGRFTISRDNSKNTLYLQMNSLRAEDTAVYYCVRHDYYDGSYGFAYWGQGTLVTVSSGGGGSGGGGSGGGGSEIVMTQSPATLSVSPGERVTLSCKASQSVGINVDWYQQKPGQAPRLLIYGASNRHTGIPARFSGSGSGREFTLTISSLQSEDFAVYYCLQYGSIPFTFGPGTKVDIK

SEQ ID NO: 10 - protein, 498 aa, artificial
  BCMA-1 HL x CD3 HL bispecific molecule
QVQLVESGGGVVQPGRSLRLSCAASGFTFSNYDMAWVRQAPGKGLEWVASIITSGDATYYRDSVKGRFTISRDNSKNTLYLQMNSLRAEDTAVYYCVRHDYYDGSYGFAYWGQGTLVTVSSGGGGSGGGGSGGGGSEIVMTQSPATLSVSPGERVTLSCKASQSVGINVDWYQQKPGQAPRLLIYGASNRHTGIPARFSGSGSGREFTLTISSLQSEDFAVYYCLQYGSIPFTFGPGTKVDIKSGGGGSEVQLVESGGGLVQPGGSLKLSCAASGFTFNKYAMNWVRQAPGKGLEWVARIRSKYNNYATYYADSVKDRFTISRDDSKNTAYLQMNNLKTEDTAVYYCVRHGNFGNSYISYWAYWGQGTLVTVSSGGGGSGGGGSGGGGSQTVVTQEPSLTVSPGGTVTLTCGSSTGAVTSGNYPNWVQQKPGQAPRGLIGGTKFLAPGTPARFSGSLLGGKAALTLSGVQPEDEAEYYCVLWYSNRWVFGGGTKLTVL

SEQ ID NO: 11 - protein, 5 aa, artificial
  VH CDR1 of BCMA-2
NYDMA

SEQ ID NO: 12 - protein, 17 aa, artificial
  VH CDR2 of BCMA-2
SIITSGDMTYYRDSVKG

SEQ ID NO: 13 - protein, 12 aa, artificial
  VH CDR3 of BCMA-2
HDYYDGSYGFAY

SEQ ID NO: 14 - protein, 11 aa, artificial
  VL CDR1 of BCMA-2
KASQSVGINVD

SEQ ID NO: 15 - protein, 7 aa, artificial
  VL CDR2 of BCMA-2
GASNRHT

SEQ ID NO: 16 - protein, 9 aa, artificial
  VL CDR3 of BCMA-2
LQYGSIPFT

SEQ ID NO: 17 - protein, 121 aa, artificial
  VH of BCMA-2
QVQLVESGGGVVQPGRSLRLSCAASGFTFSNYDMAWVRQAPGKGLEWVASIITSGDMTYYRDSVKGRFTISRDNSKNTLYLQMNSLRAEDTAVYYCVRHDYYDGSYGFAYWGQGTLVTVSS

SEQ ID NO: 18 - protein, 107 aa, artificial; identical to SEQ ID NO: 8
  VL of BCMA-2

SEQ ID NO: 19 - protein, 243 aa, artificial
  BCMA-2 scFv
QVQLVESGGGVVQPGRSLRLSCAASGFTFSNYDMAWVRQAPGKGLEWVASIITSGDMTYYRDSVKGRFTISRDNSKNTLYLQMNSLRAEDTAVYYCVRHDYYDGSYGFAYWGQGTLVTVSSGGGGSGGGGSGGGGSEIVMTQSPATLSVSPGERVTLSCKASQSVGINVDWYQQKPGQAPRLLIYGASNRHTGIPARFSGSGSGREFTLTISSLQSEDFAVYYCLQYGSIPFTFGPGTKVDIK

SEQ ID NO: 20 - protein, 498 aa, artificial
  BCMA-2 HL x CD3 HL bispecific molecule
QVQLVESGGGVVQPGRSLRLSCAASGFTFSNYDMAWVRQAPGKGLEWVASIITSGDMTYYRDSVKGRFTISRDNSKNTLYLQMNSLRAEDTAVYYCVRHDYYDGSYGFAYWGQGTLVTVSSGGGGSGGGGSGGGGSEIVMTQSPATLSVSPGERVTLSCKASQSVGINVDWYQQKPGQAPRLLIYGASNRHTGIPARFSGSGSGREFTLTISSLQSEDFAVYYCLQYGSIPFTFGPGTKVDIKSGGGGSEVQLVESGGGLVQPGGSLKLSCAASGFTFNKYAMNWVRQAPGKGLEWVARIRSKYNNYATYYADSVKDRFTISRDDSKNTAYLQMNNLKTEDTAVYYCVRHGNFGNSYISYWAYWGQGTLVTVSSGGGGSGGGGSGGGGSQTVVTQEPSLTVSPGGTVTLTCGSSTGAVTSGNYPNWVQQKPGQAPRGLIGGTKFLAPGTPARFSGSLLGGKAALTLSGVQPEDEAEYYCVLWYSNRWVFGGGTKLTVL

SEQ ID NO: 21 - protein, 5 aa, artificial
  VH CDR1 of BCMA-3
NYDMA

SEQ ID NO: 22 - protein, 17 aa, artificial
  VH CDR2 of BCMA-3
SIITSGDATYYRDSVKG

SEQ ID NO: 23 - protein, 12 aa, artificial
  VH CDR3 of BCMA-3
HDYYDGSYGFAY

SEQ ID NO: 24 - protein, 11 aa, artificial
  VL CDR1 of BCMA-3
KASQSVGINVD

SEQ ID NO: 25 - protein, 7 aa, artificial
  VL CDR2 of BCMA-3
GASNRHT

SEQ ID NO: 26 - protein, 9 aa, artificial
  VL CDR3 of BCMA-3
LQYGSIPFT

SEQ ID NO: 27 - protein, 121 aa, artificial
  VH of BCMA-3
QVQLVESGGGVVQPGRSLRLSCAASGFTFSNYDMAWVRQAPGKGLEWVASIITSGDATYYRDSVKGRFTISRDNSKNTLYLQMNSLRSEDTAVYYCVRHDYYDGSYGFAYWGQGTLVTVSS

SEQ ID NO: 28 - protein, 107 aa, artificial
  VL of BCMA-3
EIVMTQSPATLSVSPGERVTLSCKASQSVGINVDWYQQKPGQAPRLLIYGASNRHTGIPARFSGSGSGTEFTLTISSLQSEDFAVYYCLQYGSIPFTFGPGTKVDIK

SEQ ID NO: 29 - protein, 243 aa, artificial
  BCMA-3 scFv
QVQLVESGGGVVQPGRSLRLSCAASGFTFSNYDMAWVRQAPGKGLEWVASIITSGDATYYRDSVKGRFTISRDNSKNTLYLQMNSLRSEDTAVYYCVRHDYYDGSYGFAYWGQGTLVTVSSGGGGSGGGGSGGGGSEIVMTQSPATLSVSPGERVTLSCKASQSVGINVDWYQQKPGQAPRLLIYGASNRHTGIPARFSGSGSGTEFTLTISSLQSEDFAVYYCLQYGSIPFTFGPGTKVDIK

SEQ ID NO: 30 - protein, 498 aa, artificial
  BCMA-3 HL x CD3 HL bispecific molecule
QVQLVESGGGVVQPGRSLRLSCAASGFTFSNYDMAWVRQAPGKGLEWVASIITSGDATYYRDSVKGRFTISRDNSKNTLYLQMNSLRSEDTAVYYCVRHDYYDGSYGFAYWGQGTLVTVSSGGGGSGGGGSGGGGSEIVMTQSPATLSVSPGERVTLSCKASQSVGINVDWYQQKPGQAPRLLIYGASNRHTGIPARFSGSGSGTEFTLTISSLQSEDFAVYYCLQYGSIPFTFGPGTKVDIKSGGGGSEVQLVESGGGLVQPGGSLKLSCAASGFTFNKYAMNWVRQAPGKGLEWVARIRSKYNNYATYYADSVKDRFTISRDDSKNTAYLQMNNLKTEDTAVYYCVRHGNFGNSYISYWAYWGQGTLVTVSSGGGGSGGGGSGGGGSQTVVTQEPSLTVSPGGTVTLTCGSSTGAVTSGNYPNWVQQKPGQAPRGLIGGTKFLAPGTPARFSGSLLGGKAALTLSGVQPEDEAEYYCVLWYSNRWVFGGGTKLTVL

SEQ ID NO: 31 - protein, 5 aa, artificial
  VH CDR1 of BCMA-4
NYDMA

SEQ ID NO: 32 - protein, 17 aa, artificial
  VH CDR2 of BCMA-4
SIITSGDMTYYRDSVKG

SEQ ID NO: 33 - protein, 12 aa, artificial
  VH CDR3 of BCMA-4
HDYYDGSYGFAY

SEQ ID NO: 34 - protein, 11 aa, artificial
  VL CDR1 of BCMA-4
KASQSVGINVD

SEQ ID NO: 35 - protein, 7 aa, artificial
  VL CDR2 of BCMA-4
GASNRHT

SEQ ID NO: 36 - protein, 9 aa, artificial
  VL CDR3 of BCMA-4
LQYGSIPFT

SEQ ID NO: 37 - protein, 121 aa, artificial
  VH of BCMA-4
QVQLVESGGGVVQPGRSLRLSCAASGFTFSNYDMAWVRQAPGKGLEWVASIITSGDMTYYRDSVKGRFTISRDNSKNTLYLQMNSLRSEDTAVYYCVRHDYYDGSYGFAYWGQGTLVTVSS

SEQ ID NO: 38 - protein, 107 aa, artificial; identical to SEQ ID NO: 28
  VL of BCMA-4

SEQ ID NO: 39 - protein, 243 aa, artificial
  BCMA-4 scFv
QVQLVESGGGVVQPGRSLRLSCAASGFTFSNYDMAWVRQAPGKGLEWVASIITSGDMTYYRDSVKGRFTISRDNSKNTLYLQMNSLRSEDTAVYYCVRHDYYDGSYGFAYWGQGTLVTVSSGGGGSGGGGSGGGGSEIVMTQSPATLSVSPGERVTLSCKASQSVGINVDWYQQKPGQAPRLLIYGASNRHTGIPARFSGSGSGTEFTLTISSLQSEDFAVYYCLQYGSIPFTFGPGTKVDIK

SEQ ID NO: 40 - protein, 498 aa, artificial
  BCMA-4 HL x CD3 HL bispecific molecule
QVQLVESGGGVVQPGRSLRLSCAASGFTFSNYDMAWVRQAPGKGLEWVASIITSGDMTYYRDSVKGRFTISRDNSKNTLYLQMNSLRSEDTAVYYCVRHDYYDGSYGFAYWGQGTLVTVSSGGGGSGGGGSGGGGSEIVMTQSPATLSVSPGERVTLSCKASQSVGINVDWYQQKPGQAPRLLIYGASNRHTGIPARFSGSGSGTEFTLTISSLQSEDFAVYYCLQYGSIPFTFGPGTKVDIKSGGGGSEVQLVESGGGLVQPGGSLKLSCAASGFTFNKYAMNWVRQAPGKGLEWVARIRSKYNNYATYYADSVKDRFTISRDDSKNTAYLQMNNLKTEDTAVYYCVRHGNFGNSYISYWAYWGQGTLVTVSSGGGGSGGGGSGGGGSQTVVTQEPSLTVSPGGTVTLTCGSSTGAVTSGNYPNWVQQKPGQAPRGLIGGTKFLAPGTPARFSGSLLGGKAALTLSGVQPEDEAEYYCVLWYSNRWVFGGGTKLTVL

SEQ ID NO: 41 - protein, 5 aa, artificial
  VH CDR1 of BCMA-5
NYDMA

SEQ ID NO: 42 - protein, 17 aa, artificial
  VH CDR2 of BCMA-5
SIITSGDATYYRDSVKG

SEQ ID NO: 43 - protein, 12 aa, artificial
  VH CDR3 of BCMA-5
HDYYDGSYGFAY

SEQ ID NO: 44 - protein, 11 aa, artificial
  VL CDR1 of BCMA-5
KASQSVGINVD

SEQ ID NO: 45 - protein, 7 aa, artificial
  VL CDR2 of BCMA-5
GASNRHT

SEQ ID NO: 46 - protein, 9 aa, artificial
  VL CDR3 of BCMA-5
LQYGSIPFT

SEQ ID NO: 47 - protein, 121 aa, artificial
  VH of BCMA-5
QVQLVESGGGVVQPGRSLRLSCAASGFTFSNYDMAWVRQAPGKGLEWVASIITSGDATYYRDSVKGRFTISRDNAKNTLYLQMNSLRAEDTAVYYCVRHDYYDGSYGFAYWGQGTLVTVSS

SEQ ID NO: 48 - protein, 107 aa, artificial
  VL of BCMA-5
EIVMTQSPASMSVSPGERATLSCKASQSVGINVDWYQQKPGQAPRLLIYGASNRHTGIPARFSGSGSGTEFTLTISSLQSEDFAVYYCLQYGSIPFTFGPGTKVDIK

SEQ ID NO: 49 - protein, 243 aa, artificial
  BCMA-5 scFv
QVQLVESGGGVVQPGRSLRLSCAASGFTFSNYDMAWVRQAPGKGLEWVASIITSGDATYYRDSVKGRFTISRDNAKNTLYLQMNSLRAEDTAVYYCVRHDYYDGSYGFAYWGQGTLVTVSSGGGGSGGGGSGGGGSEIVMTQSPASMSVSPGERATLSCKASQSVGINVDWYQQKPGQAPRLLIYGASNRHTGIPARFSGSGSGTEFTLTISSLQSEDFAVYYCLQYGSIPFTFGPGTKVDIK

SEQ ID NO: 50 - protein, 498 aa, artificial
  BCMA-5 HL x CD3 HL bispecific molecule
QVQLVESGGGVVQPGRSLRLSCAASGFTFSNYDMAWVRQAPGKGLEWVASIITSGDATYYRDSVKGRFTISRDNAKNTLYLQMNSLRAEDTAVYYCVRHDYYDGSYGFAYWGQGTLVTVSSGGGGSGGGGSGGGGSEIVMTQSPASMSVSPGERATLSCKASQSVGINVDWYQQKPGQAPRLLIYGASNRHTGIPARFSGSGSGTEFTLTISSLQSEDFAVYYCLQYGSIPFTFGPGTKVDIKSGGGGSEVQLVESGGGLVQPGGSLKLSCAASGFTFNKYAMNWVRQAPGKGLEWVARIRSKYNNYATYYADSVKDRFTISRDDSKNTAYLQMNNLKTEDTAVYYCVRHGNFGNSYISYWAYWGQGTLVTVSSGGGGSGGGGSGGGGSQTVVTQEPSLTVSPGGTVTLTCGSSTGAVTSGNYPNWVQQKPGQAPRGLIGGTKFLAPGTPARFSGSLLGGKAALTLSGVQPEDEAEYYCVLWYSNRWVFGGGTKLTVL

SEQ ID NO: 51 - protein, 5 aa, artificial
  VH CDR1 of BCMA-6
NYDMA

SEQ ID NO: 52 - protein, 17 aa, artificial
  VH CDR2 of BCMA-6
SIITSGDMTYYRDSVKG

SEQ ID NO: 53 - protein, 12 aa, artificial
  VH CDR3 of BCMA-6
HDYYDGSYGFAY

SEQ ID NO: 54 - protein, 11 aa, artificial
  VL CDR1 of BCMA-6
KASQSVGINVD

SEQ ID NO: 55 - protein, 7 aa, artificial
  VL CDR2 of BCMA-6
GASNRHT

SEQ ID NO: 56 - protein, 9 aa, artificial
  VL CDR3 of BCMA-6
LQYGSIPFT

SEQ ID NO: 57 - protein, 121 aa, artificial
  VH of BCMA-6
QVQLVESGGGVVQPGRSLRLSCAASGFTFSNYDMAWVRQAPGKGLEWVASIITSGDMTYYRDSVKGRFTISRDNAKNTLYLQMNSLRAEDTAVYYCVRHDYYDGSYGFAYWGQGTLVTVSS

SEQ ID NO: 58 - protein, 107 aa, artificial; identical to SEQ ID NO: 48
  VL of BCMA-6

SEQ ID NO: 59 - protein, 243 aa, artificial
  BCMA-6 scFv
QVQLVESGGGVVQPGRSLRLSCAASGFTFSNYDMAWVRQAPGKGLEWVASIITSGDMTYYRDSVKGRFTISRDNAKNTLYLQMNSLRAEDTAVYYCVRHDYYDGSYGFAYWGQGTLVTVSSGGGGSGGGGSGGGGSEIVMTQSPASMSVSPGERATLSCKASQSVGINVDWYQQKPGQAPRLLIYGASNRHTGIPARFSGSGSGTEFTLTISSLQSEDFAVYYCLQYGSIPFTFGPGTKVDIK

SEQ ID NO: 60 - protein, 498 aa, artificial
  BCMA-6 HL x CD3 HL bispecific molecule
QVQLVESGGGVVQPGRSLRLSCAASGFTFSNYDMAWVRQAPGKGLEWVASIITSGDMTYYRDSVKGRFTISRDNAKNTLYLQMNSLRAEDTAVYYCVRHDYYDGSYGFAYWGQGTLVTVSSGGGGSGGGGSGGGGSEIVMTQSPASMSVSPGERATLSCKASQSVGINVDWYQQKPGQAPRLLIYGASNRHTGIPARFSGSGSGTEFTLTISSLQSEDFAVYYCLQYGSIPFTFGPGTKVDIKSGGGGSEVQLVESGGGLVQPGGSLKLSCAASGFTFNKYAMNWVRQAPGKGLEWVARIRSKYNNYATYYADSVKDRFTISRDDSKNTAYLQMNNLKTEDTAVYYCVRHGNFGNSYISYWAYWGQGTLVTVSSGGGGSGGGGSGGGGSQTVVTQEPSLTVSPGGTVTLTCGSSTGAVTSGNYPNWVQQKPGQAPRGLIGGTKFLAPGTPARFSGSLLGGKAALTLSGVQPEDEAEYYCVLWYSNRWVFGGGTKLTVL

SEQ ID NO: 61 - protein, 5 aa, artificial
  VH CDR1 of BCMA-7
NYDMA

SEQ ID NO: 62 - protein, 17 aa, artificial
  VH CDR2 of BCMA-7
SIITSGDATYYRDSVKG

SEQ ID NO: 63 - protein, 12 aa, artificial
  VH CDR3 of BCMA-7
HDYYDGSYGFAY

SEQ ID NO: 64 - protein, 11 aa, artificial
  VL CDR1 of BCMA-7
KASQSVGINVD

SEQ ID NO: 65 - protein, 7 aa, artificial
  VL CDR2 of BCMA-7
GASNRHT

SEQ ID NO: 66 - protein, 9 aa, artificial
  VL CDR3 of BCMA-7
LQYGSIPFT

SEQ ID NO: 67 - protein, 121 aa, artificial
  VH of BCMA-7
QVQLVESGGGVVQPGRSLRLSCAASGFTFSNYDMAWVRQAPGKGLEWVASIITSGDATYYRDSVKGRFTVSRDNSKNTLYLQMNSLRAEDTAVYYCVRHDYYDGSYGFAYWGQGTLVTVSS

SEQ ID NO: 68 - protein, 107 aa, artificial
  VL of BCMA-7
EIVMTQSPATLSVSPGERATLSCKASQSVGINVDWYQQKPGQAPRLLIYGASNRHTGIPARFSGSGSGTEFTLTISSLQAEDFAVYYCLQYGSIPFTFGPGTKVDIK

SEQ ID NO: 69 - protein, 243 aa, artificial
  BCMA-7 scFv
QVQLVESGGGVVQPGRSLRLSCAASGFTFSNYDMAWVRQAPGKGLEWVASIITSGDATYYRDSVKGRFTVSRDNSKNTLYLQMNSLRAEDTAVYYCVRHDYYDGSYGFAYWGQGTLVTVSSGGGGSGGGGSGGGGSEIVMTQSPATLSVSPGERATLSCKASQSVGINVDWYQQKPGQAPRLLIYGASNRHTGIPARFSGSGSGTEFTLTISSLQAEDFAVYYCLQYGSIPFTFGPGTKVDIK

SEQ ID NO: 70 - protein, 498 aa, artificial
  BCMA-7 HL x CD3 HL bispecific molecule
QVQLVESGGGVVQPGRSLRLSCAASGFTFSNYDMAWVRQAPGKGLEWVASIITSGDATYYRDSVKGRFTVSRDNSKNTLYLQMNSLRAEDTAVYYCVRHDYYDGSYGFAYWGQGTLVTVSSGGGGSGGGGSGGGGSEIVMTQSPATLSVSPGERATLSCKASQSVGINVDWYQQKPGQAPRLLIYGASNRHTGIPARFSGSGSGTEFTLTISSLQAEDFAVYYCLQYGSIPFTFGPGTKVDIKSGGGGSEVQLVESGGGLVQPGGSLKLSCAASGFTFNKYAMNWVRQAPGKGLEWVARIRSKYNNYATYYADSVKDRFTISRDDSKNTAYLQMNNLKTEDTAVYYCVRHGNFGNSYISYWAYWGQGTLVTVSSGGGGSGGGGSGGGGSQTVVTQEPSLTVSPGGTVTLTCGSSTGAVTSGNYPNWVQQKPGQAPRGLIGGTKFLAPGTPARFSGSLLGGKAALTLSGVQPEDEAEYYCVLWYSNRWVFGGGTKLTVL

SEQ ID NO: 71 - protein, 5 aa, artificial
  VH CDR1 of BCMA-8
NYDMA

SEQ ID NO: 72 - protein, 17 aa, artificial
  VH CDR2 of BCMA-8
SIITSGDMTYYRDSVKG

SEQ ID NO: 73 - protein, 12 aa, artificial
  VH CDR3 of BCMA-8
HDYYDGSYGFAY

SEQ ID NO: 74 - protein, 11 aa, artificial
  VL CDR1 of BCMA-8
KASQSVGINVD

SEQ ID NO: 75 - protein, 7 aa, artificial
  VL CDR2 of BCMA-8
GASNRHT

SEQ ID NO: 76 - protein, 9 aa, artificial
  VL CDR3 of BCMA-8
LQYGSIPFT

SEQ ID NO: 77 - protein, 121 aa, artificial
  VH of BCMA-8
QVQLVESGGGVVQPGRSLRLSCAASGFTFSNYDMAWVRQAPGKGLEWVASIITSGDMTYYRDSVKGRFTVSRDNSKNTLYLQMNSLRAEDTAVYYCVRHDYYDGSYGFAYWGQGTLVTVSS

SEQ ID NO: 78 - protein, 107 aa, artificial; identical to SEQ ID NO: 68
  VL of BCMA-8

SEQ ID NO: 79 - protein, 243 aa, artificial
  BCMA-8 scFv
QVQLVESGGGVVQPGRSLRLSCAASGFTFSNYDMAWVRQAPGKGLEWVASIITSGDMTYYRDSVKGRFTVSRDNSKNTLYLQMNSLRAEDTAVYYCVRHDYYDGSYGFAYWGQGTLVTVSSGGGGSGGGGSGGGGSEIVMTQSPATLSVSPGERATLSCKASQSVGINVDWYQQKPGQAPRLLIYGASNRHTGIPARFSGSGSGTEFTLTISSLQAEDFAVYYCLQYGSIPFTFGPGTKVDIK

SEQ ID NO: 80 - protein, 498 aa, artificial
  BCMA-8 HL x CD3 HL bispecific molecule
QVQLVESGGGVVQPGRSLRLSCAASGFTFSNYDMAWVRQAPGKGLEWVASIITSGDMTYYRDSVKGRFTVSRDNSKNTLYLQMNSLRAEDTAVYYCVRHDYYDGSYGFAYWGQGTLVTVSSGGGGSGGGGSGGGGSEIVMTQSPATLSVSPGERATLSCKASQSVGINVDWYQQKPGQAPRLLIYGASNRHTGIPARFSGSGSGTEFTLTISSLQAEDFAVYYCLQYGSIPFTFGPGTKVDIKSGGGGSEVQLVESGGGLVQPGGSLKLSCAASGFTFNKYAMNWVRQAPGKGLEWVARIRSKYNNYATYYADSVKDRFTISRDDSKNTAYLQMNNLKTEDTAVYYCVRHGNFGNSYISYWAYWGQGTLVTVSSGGGGSGGGGSGGGGSQTVVTQEPSLTVSPGGTVTLTCGSSTGAVTSGNYPNWVQQKPGQAPRGLIGGTKFLAPGTPARFSGSLLGGKAALTLSGVQPEDEAEYYCVLWYSNRWVFGGGTKLTVL

SEQ ID NO: 81 - protein, 5 aa, artificial
  VH CDR1 of BCMA-9
NYWIH

SEQ ID NO: 82 - protein, 17 aa, artificial
  VH CDR2 of BCMA-9
AIYPGNSDTHYNQKFQG

SEQ ID NO: 83 - protein, 12 aa, artificial
  VH CDR3 of BCMA-9
SSYYYDGSLFAS

SEQ ID NO: 84 - protein, 16 aa, artificial
  VL CDR1 of BCMA-9
RSSQSIVHSNGNTYLY

SEQ ID NO: 85 - protein, 7 aa, artificial
  VL CDR2 of BCMA-9
RVSNRFS

SEQ ID NO: 86 - protein, 9 aa, artificial
  VL CDR3 of BCMA-9
FQGSTLPFT

SEQ ID NO: 87 - protein, 121 aa, artificial
  VH of BCMA-9
QVQLVQSGAEVKKPGASVKVSCKASGYTFTNYWIHWVKQAPGQRLEWIGAIYPGNSDTHYNQKFQGKVTITRDTSASTAYMELSSLTSEDTAVYYCTRSSYYYDGSLFASWGQGTLVTVSS

SEQ ID NO: 88 - protein, 112 aa, artificial
  VL of BCMA-9
DIVMTQTPLSLSVSPGQPASISCRSSQSIVHSNGNTYLYWYLQKPGQPPQLLIYRVSNRFSGVPDRFSGSGSGTDFTLKISRVEAEDVGVYYCFQGSTLPFTFGQGTKLEIK

SEQ ID NO: 89 - protein, 248 aa, artificial
  BCMA-9 scFv
QVQLVQSGAEVKKPGASVKVSCKASGYTFTNYWIHWVKQAPGQRLEWIGAIYPGNSDTHYNQKFQGKVTITRDTSASTAYMELSSLTSEDTAVYYCTRSSYYYDGSLFASWGQGTLVTVSSGGGGSGGGGSGGGGSDIVMTQTPLSLSVSPGQPASISCRSSQSIVHSNGNTYLYWYLQKPGQPPQLLIYRVSNRFSGVPDRFSGSGSGTDFTLKISRVEAEDVGVYYCFQGSTLPFTFGQGTKLEIK

SEQ ID NO: 90 - protein, 503 aa, artificial
  BCMA-9 HL x CD3 HL bispecific molecule
QVQLVQSGAEVKKPGASVKVSCKASGYTFTNYWIHWVKQAPGQRLEWIGAIYPGNSDTHYNQKFQGKVTITRDTSASTAYMELSSLTSEDTAVYYCTRSSYYYDGSLFASWGQGTLVTVSSGGGGSGGGGSGGGGSDIVMTQTPLSLSVSPGQPASISCRSSQSIVHSNGNTYLYWYLQKPGQPPQLLIYRVSNRFSGVPDRFSGSGSGTDFTLKISRVEAEDVGVYYCFQGSTLPFTFGQGTKLEIKSGGGGSEVQLVESGGGLVQPGGSLKLSCAASGFTFNKYAMNWVRQAPGKGLEWVARIRSKYNNYATYYADSVKDRFTISRDDSKNTAYLQMNNLKTEDTAVYYCVRHGNFGNSYISYWAYWGQGTLVTVSSGGGGSGGGGSGGGGSQTVVTQEPSLTVSPGGTVTLTCGSSTGAVTSGNYPNWVQQKPGQAPRGLIGGTKFLAPGTPARFSGSLLGGKAALTLSGVQPEDEAEYYCVLWYSNRWVFGGGTKLTVL

SEQ ID NO: 91 - protein, 5 aa, artificial
  VH CDR1 of BCMA-10
NYWIH

SEQ ID NO: 92 - protein, 17 aa, artificial
  VH CDR2 of BCMA-10
AIYPGNSDTHYNQKFQG

SEQ ID NO: 93 - protein, 12 aa, artificial
  VH CDR3 of BCMA-10
SSYYYDGSLFAS

SEQ ID NO: 94 - protein, 16 aa, artificial
  VL CDR1 of BCMA-10
RSSQSIVHSNGNTYLY

SEQ ID NO: 95 - protein, 7 aa, artificial
  VL CDR2 of BCMA-10
RVSNRFS

SEQ ID NO: 96 - protein, 9 aa, artificial
  VL CDR3 of BCMA-10
FQGSHLPFT

SEQ ID NO: 97 - protein, 121 aa, artificial; identical to SEQ ID NO: 87
  VH of BCMA-10

SEQ ID NO: 98 - protein, 112 aa, artificial
  VL of BCMA-10
DIVMTQTPLSLSVSPGQPASISCRSSQSIVHSNGNTYLYWYLQKPGQPPQLLIYRVSNRFSGVPDRFSGSGSGTDFTLKISRVEAEDVGVYYCFQGSHLPFTFGQGTKLEIK

SEQ ID NO: 99 - protein, 248 aa, artificial
  BCMA-10 scFv
QVQLVQSGAEVKKPGASVKVSCKASGYTFTNYWIHWVKQAPGQRLEWIGAIYPGNSDTHYNQKFQGKVTITRDTSASTAYMELSSLTSEDTAVYYCTRSSYYYDGSLFASWGQGTLVTVSSGGGGSGGGGSGGGGSDIVMTQTPLSLSVSPGQPASISCRSSQSIVHSNGNTYLYWYLQKPGQPPQLLIYRVSNRFSGVPDRFSGSGSGTDFTLKISRVEAEDVGVYYCFQGSHLPFTFGQGTKLEIK

SEQ ID NO: 100 - protein, 503 aa, artificial
  BCMA-10 HL x CD3 HL bispecific molecule
QVQLVQSGAEVKKPGASVKVSCKASGYTFTNYWIHWVKQAPGQRLEWIGAIYPGNSDTHYNQKFQGKVTITRDTSASTAYMELSSLTSEDTAVYYCTRSSYYYDGSLFASWGQGTLVTVSSGGGGSGGGGSGGGGSDIVMTQTPLSLSVSPGQPASISCRSSQSIVHSNGNTYLYWYLQKPGQPPQLLIYRVSNRFSGVPDRFSGSGSGTDFTLKISRVEAEDVGVYYCFQGSHLPFTFGQGTKLEIKSGGGGSEVQLVESGGGLVQPGGSLKLSCAASGFTFNKYAMNWVRQAPGKGLEWVARIRSKYNNYATYYADSVKDRFTISRDDSKNTAYLQMNNLKTEDTAVYYCVRHGNFGNSYISYWAYWGQGTLVTVSSGGGGSGGGGSGGGGSQTVVTQEPSLTVSPGGTVTLTCGSSTGAVTSGNYPNWVQQKPGQAPRGLIGGTKFLAPGTPARFSGSLLGGKAALTLSGVQPEDEAEYYCVLWYSNRWVFGGGTKLTVL

SEQ ID NO: 101 - protein, 5 aa, artificial
  VH CDR1 of BCMA-11
NYWIH

SEQ ID NO: 102 - protein, 17 aa, artificial
  VH CDR2 of BCMA-11
AIYPGNSDTHYNQKFQG

SEQ ID NO: 103 - protein, 12 aa, artificial
  VH CDR3 of BCMA-11
SSYYYDGSLFAS

SEQ ID NO: 104 - protein, 16 aa, artificial
  VL CDR1 of BCMA-11
KSSQSIVHSNGNTYLY

SEQ ID NO: 105 - protein, 7 aa, artificial
  VL CDR2 of BCMA-11
RVSNRFS

SEQ ID NO: 106 - protein, 9 aa, artificial
  VL CDR3 of BCMA-11
FQGSTLPFT

SEQ ID NO: 107 - protein, 121 aa, artificial; identical to SEQ ID NO: 87
  VH of BCMA-11

SEQ ID NO: 108 - protein, 112 aa, artificial
  VL of BCMA-11
DIVMTQTPLSLSVTPGQQASISCKSSQSIVHSNGNTYLYWYLQKPGQPPQLLIYRVSNRFSGVPDRFSGSGSGTDFTLKISRVEAEDVGVYYCFQGSTLPFTFGQGTKLEIK

SEQ ID NO: 109 - protein, 248 aa, artificial
  BCMA-11 scFv
QVQLVQSGAEVKKPGASVKVSCKASGYTFTNYWIHWVKQAPGQRLEWIGAIYPGNSDTHYNQKFQGKVTITRDTSASTAYMELSSLTSEDTAVYYCTRSSYYYDGSLFASWGQGTLVTVSSGGGGSGGGGSGGGGSDIVMTQTPLSLSVTPGQQASISCKSSQSIVHSNGNTYLYWYLQKPGQPPQLLIYRVSNRFSGVPDRFSGSGSGTDFTLKISRVEAEDVGVYYCFQGSTLPFTFGQGTKLEIK

SEQ ID NO: 110 - protein, 503 aa, artificial
  BCMA-11 HL x CD3 HL bispecific molecule
QVQLVQSGAEVKKPGASVKVSCKASGYTFTNYWIHWVKQAPGQRLEWIGAIYPGNSDTHYNQKFQGKVTITRDTSASTAYMELSSLTSEDTAVYYCTRSSYYYDGSLFASWGQGTLVTVSSGGGGSGGGGSGGGGSDIVMTQTPLSLSVTPGQQASISCKSSQSIVHSNGNTYLYWYLQKPGQPPQLLIYRVSNRFSGVPDRFSGSGSGTDFTLKISRVEAEDVGVYYCFQGSTLPFTFGQGTKLEIKSGGGGSEVQLVESGGGLVQPGGSLKLSCAASGFTFNKYAMNWVRQAPGKGLEWVARIRSKYNNYATYYADSVKDRFTISRDDSKNTAYLQMNNLKTEDTAVYYCVRHGNFGNSYISYWAYWGQGTLVTVSSGGGGSGGGGSGGGGSQTVVTQEPSLTVSPGGTVTLTCGSSTGAVTSGNYPNWVQQKPGQAPRGLIGGTKFLAPGTPARFSGSLLGGKAALTLSGVQPEDEAEYYCVLWYSNRWVFGGGTKLTVL

SEQ ID NO: 111 - protein, 5 aa, artificial
  VH CDR1 of BCMA-12
NYWIH

SEQ ID NO: 112 - protein, 17 aa, artificial
  VH CDR2 of BCMA-12
AIYPGNSDTHYNQKFQG

SEQ ID NO: 113 - protein, 12 aa, artificial
  VH CDR3 of BCMA-12
SSYYYDGSLFAS

SEQ ID NO: 114 - protein, 16 aa, artificial
  VL CDR1 of BCMA-12
KSSQSIVHSNGNTYLY

SEQ ID NO: 115 - protein, 7 aa, artificial
  VL CDR2 of BCMA-12
RVSNRFS

SEQ ID NO: 116 - protein, 9 aa, artificial
  VL CDR3 of BCMA-12
FQGSHLPFT

SEQ ID NO: 117 - protein, 121 aa, artificial; identical to SEQ ID NO: 87
  VH of BCMA-12

SEQ ID NO: 118 - protein, 112 aa, artificial
  VL of BCMA-12
DIVMTQTPLSLSVTPGQQASISCKSSQSIVHSNGNTYLYWYLQKPGQPPQLLIYRVSNRFSGVPDRFSGSGSGTDFTLKISRVEAEDVGVYYCFQGSHLPFTFGQGTKLEIK

SEQ ID NO: 119 - protein, 248 aa, artificial
  BCMA-12 scFv
QVQLVQSGAEVKKPGASVKVSCKASGYTFTNYWIHWVKQAPGQRLEWIGAIYPGNSDTHYNQKFQGKVTITRDTSASTAYMELSSLTSEDTAVYYCTRSSYYYDGSLFASWGQGTLVTVSSGGGGSGGGGSGGGGSDIVMTQTPLSLSVTPGQQASISCKSSQSIVHSNGNTYLYWYLQKPGQPPQLLIYRVSNRFSGVPDRFSGSGSGTDFTLKISRVEAEDVGVYYCFQGSHLPFTFGQGTKLEIK

SEQ ID NO: 120 - protein, 503 aa, artificial
  BCMA-12 HL x CD3 HL bispecific molecule
QVQLVQSGAEVKKPGASVKVSCKASGYTFTNYWIHWVKQAPGQRLEWIGAIYPGNSDTHYNQKFQGKVTITRDTSASTAYMELSSLTSEDTAVYYCTRSSYYYDGSLFASWGQGTLVTVSSGGGGSGGGGSGGGGSDIVMTQTPLSLSVTPGQQASISCKSSQSIVHSNGNTYLYWYLQKPGQPPQLLIYRVSNRFSGVPDRFSGSGSGTDFTLKISRVEAEDVGVYYCFQGSHLPFTFGQGTKLEIKSGGGGSEVQLVESGGGLVQPGGSLKLSCAASGFTFNKYAMNWVRQAPGKGLEWVARIRSKYNNYATYYADSVKDRFTISRDDSKNTAYLQMNNLKTEDTAVYYCVRHGNFGNSYISYWAYWGQGTLVTVSSGGGGSGGGGSGGGGSQTVVTQEPSLTVSPGGTVTLTCGSSTGAVTSGNYPNWVQQKPGQAPRGLIGGTKFLAPGTPARFSGSLLGGKAALTLSGVQPEDEAEYYCVLWYSNRWVFGGGTKLTVL

SEQ ID NO: 121 - protein, 5 aa, artificial
  VH CDR1 of BCMA-13
NYWIH

SEQ ID NO: 122 - protein, 17 aa, artificial
  VH CDR2 of BCMA-13
AIYPGNSDTHYNQKFQG

SEQ ID NO: 123 - protein, 12 aa, artificial
  VH CDR3 of BCMA-13
SSYYYDGSLFAS

SEQ ID NO: 124 - protein, 16 aa, artificial
  VL CDR1 of BCMA-13
KSSQSIVHSNGNTYLY

SEQ ID NO: 125 - protein, 7 aa, artificial
  VL CDR2 of BCMA-13
RVSNRFS

SEQ ID NO: 126 - protein, 9 aa, artificial
  VL CDR3 of BCMA-13
FQGSTLPFT

SEQ ID NO: 127 - protein, 121 aa, artificial
  VH of BCMA-13
QVQLVQSGAVVAKPGASVKVSCKASGYTFTNYWIHWVKQAPGQRLEWMGAIYPGNSDTHYNQKFQGRVTLTTDTSASTAYMELSSLRNEDTAVYYCTRSSYYYDGSLFASWGQGTLVTVSS

SEQ ID NO: 128 - protein, 112 aa, artificial; identical to SEQ ID NO: 108
  VL of BCMA-13

SEQ ID NO: 129 - protein, 248 aa, artificial
  BCMA-13 scFv
QVQLVQSGAVVAKPGASVKVSCKASGYTFTNYWIHWVKQAPGQRLEWMGAIYPGNSDTHYNQKFQGRVTLTTDTSASTAYMELSSLRNEDTAVYYCTRSSYYYDGSLFASWGQGTLVTVSSGGGGSGGGGSGGGGSDIVMTQTPLSLSVTPGQQASISCKSSQSIVHSNGNTYLYWYLQKPGQPPQLLIYRVSNRFSGVPDRFSGSGSGTDFTLKISRVEAEDVGVYYCFQGSTLPFTFGQGTKLEIK

SEQ ID NO: 130 - protein, 503 aa, artificial
  BCMA-13 HL x CD3 HL bispecific molecule
QVQLVQSGAVVAKPGASVKVSCKASGYTFTNYWIHWVKQAPGQRLEWMGAIYPGNSDTHYNQKFQGRVTLTTDTSASTAYMELSSLRNEDTAVYYCTRSSYYYDGSLFASWGQGTLVTVSSGGGGSGGGGSGGGGSDIVMTQTPLSLSVTPGQQASISCKSSQSIVHSNGNTYLYWYLQKPGQPPQLLIYRVSNRFSGVPDRFSGSGSGTDFTLKISRVEAEDVGVYYCFQGSTLPFTFGQGTKLEIKSGGGGSEVQLVESGGGLVQPGGSLKLSCAASGFTFNKYAMNWVRQAPGKGLEWVARIRSKYNNYATYYADSVKDRFTISRDDSKNTAYLQMNNLKTEDTAVYYCVRHGNFGNSYISYWAYWGQGTLVTVSSGGGGSGGGGSGGGGSQTVVTQEPSLTVSPGGTVTLTCGSSTGAVTSGNYPNWVQQKPGQAPRGLIGGTKFLAPGTPARFSGSLLGGKAALTLSGVQPEDEAEYYCVLWYSNRWVFGGGTKLTVL

SEQ ID NO: 131 - protein, 5 aa, artificial
  VH CDR1 of BCMA-14
NYWIH

SEQ ID NO: 132 - protein, 17 aa, artificial
  VH CDR2 of BCMA-14
AIYPGNSDTHYNQKFQG

SEQ ID NO: 133 - protein, 12 aa, artificial
  VH CDR3 of BCMA-14
SSYYYDGSLFAS

SEQ ID NO: 134 - protein, 16 aa, artificial
  VL CDR1 of BCMA-14
KSSQSIVHSNGNTYLY

SEQ ID NO: 135 - protein, 7 aa, artificial
  VL CDR2 of BCMA-14
RVSNRFS

SEQ ID NO: 136 - protein, 9 aa, artificial
  VL CDR3 of BCMA-14
FQGSHLPFT

SEQ ID NO: 137 - protein, 121 aa, artificial; identical to SEQ ID NO: 127
  VH of BCMA-14

SEQ ID NO: 138 - protein, 112 aa, artificial; identical to SEQ ID NO: 118
  VL of BCMA-14

SEQ ID NO: 139 - protein, 248 aa, artificial
  BCMA-14 scFv
QVQLVQSGAVVAKPGASVKVSCKASGYTFTNYWIHWVKQAPGQRLEWMGAIYPGNSDTHYNQKFQGRVTLTTDTSASTAYMELSSLRNEDTAVYYCTRSSYYYDGSLFASWGQGTLVTVSSGGGGSGGGGSGGGGSDIVMTQTPLSLSVTPGQQASISCKSSQSIVHSNGNTYLYWYLQKPGQPPQLLIYRVSNRFSGVPDRFSGSGSGTDFTLKISRVEAEDVGVYYCFQGSHLPFTFGQGTKLEIK

SEQ ID NO: 140 - protein, 503 aa, artificial
  BCMA-14 HL x CD3 HL bispecific molecule
QVQLVQSGAVVAKPGASVKVSCKASGYTFTNYWIHWVKQAPGQRLEWMGAIYPGNSDTHYNQKFQGRVTLTTDTSASTAYMELSSLRNEDTAVYYCTRSSYYYDGSLFASWGQGTLVTVSSGGGGSGGGGSGGGGSDIVMTQTPLSLSVTPGQQASISCKSSQSIVHSNGNTYLYWYLQKPGQPPQLLIYRVSNRFSGVPDRFSGSGSGTDFTLKISRVEAEDVGVYYCFQGSHLPFTFGQGTKLEIKSGGGGSEVQLVESGGGLVQPGGSLKLSCAASGFTFNKYAMNWVRQAPGKGLEWVARIRSKYNNYATYYADSVKDRFTISRDDSKNTAYLQMNNLKTEDTAVYYCVRHGNFGNSYISYWAYWGQGTLVTVSSGGGGSGGGGSGGGGSQTVVTQEPSLTVSPGGTVTLTCGSSTGAVTSGNYPNWVQQKPGQAPRGLIGGTKFLAPGTPARFSGSLLGGKAALTLSGVQPEDEAEYYCVLWYSNRWVFGGGTKLTVL

SEQ ID NO: 141 - protein, 5 aa, artificial
  VH CDR1 of BCMA-15
SYWIH

SEQ ID NO: 142 - protein, 17 aa, artificial
  VH CDR2 of BCMA-15
AIYPGNSDTHYNQKFQG

SEQ ID NO: 143 - protein, 12 aa, artificial
  VH CDR3 of BCMA-15
SSYYYDGSLFAD

SEQ ID NO: 144 - protein, 16 aa, artificial
  VL CDR1 of BCMA-15
KSSQSIVHSNGNTYLY

SEQ ID NO: 145 - protein, 7 aa, artificial
  VL CDR2 of BCMA-15
RVSNRFS

SEQ ID NO: 146 - protein, 9 aa, artificial
  VL CDR3 of BCMA-15
FQGSTLPFT

SEQ ID NO: 147 - protein, 121 aa, artificial
  VH of BCMA-15
QVQLVQSGAEVKKPGTSVKVSCKASGYTFTSYWIHWVKQAPGQRLEWIGAIYPGNSDTHYNQKFQGRVTLTRDTSASTAYMELSSLRSEDSAVYYCTRSSYYYDGSLFADWGQGTLVTVSS

SEQ ID NO: 148 - protein, 112 aa, artificial
  VL of BCMA-15
DIVMTQTPLSLSVTPGQPASISCKSSQSIVHSNGNTYLYWYLQKPGQPPQLLIYRVSNRFSGVPDRFSGSGSGTDFTLKISRVEAEDVGVYYCFQGSTLPFTFGQGTKLEIK

SEQ ID NO: 149 - protein, 248 aa, artificial
  BCMA-15 scFv
QVQLVQSGAEVKKPGTSVKVSCKASGYTFTSYWIHWVKQAPGQRLEWIGAIYPGNSDTHYNQKFQGRVTLTRDTSASTAYMELSSLRSEDSAVYYCTRSSYYYDGSLFADWGQGTLVTVSSGGGGSGGGGSGGGGSDIVMTQTPLSLSVTPGQPASISCKSSQSIVHSNGNTYLYWYLQKPGQPPQLLIYRVSNRFSGVPDRFSGSGSGTDFTLKISRVEAEDVGVYYCFQGSTLPFTFGQGTKLEIK

SEQ ID NO: 150 - protein, 503 aa, artificial
  BCMA-15 HL x CD3 HL bispecific molecule
QVQLVQSGAEVKKPGTSVKVSCKASGYTFTSYWIHWVKQAPGQRLEWIGAIYPGNSDTHYNQKFQGRVTLTRDTSASTAYMELSSLRSEDSAVYYCTRSSYYYDGSLFADWGQGTLVTVSSGGGGSGGGGSGGGGSDIVMTQTPLSLSVTPGQPASISCKSSQSIVHSNGNTYLYWYLQKPGQPPQLLIYRVSNRFSGVPDRFSGSGSGTDFTLKISRVEAEDVGVYYCFQGSTLPFTFGQGTKLEIKSGGGGSEVQLVESGGGLVQPGGSLKLSCAASGFTFNKYAMNWVRQAPGKGLEWVARIRSKYNNYATYYADSVKDRFTISRDDSKNTAYLQMNNLKTEDTAVYYCVRHGNFGNSYISYWAYWGQGTLVTVSSGGGGSGGGGSGGGGSQTVVTQEPSLTVSPGGTVTLTCGSSTGAVTSGNYPNWVQQKPGQAPRGLIGGTKFLAPGTPARFSGSLLGGKAALTLSGVQPEDEAEYYCVLWYSNRWVFGGGTKLTVL

SEQ ID NO: 151 - protein, 5 aa, artificial
  VH CDR1 of BCMA-16
SYWIH

SEQ ID NO: 152 - protein, 17 aa, artificial
  VH CDR2 of BCMA-16
AIYPGNSDTHYNQKFQG

SEQ ID NO: 153 - protein, 12 aa, artificial
  VH CDR3 of BCMA-16
SSYYYDGSLFAD

SEQ ID NO: 154 - protein, 16 aa, artificial
  VL CDR1 of BCMA-16
KSSQSIVHSNGNTYLY

SEQ ID NO: 155 - protein, 7 aa, artificial
  VL CDR2 of BCMA-16
RVSNRFS

SEQ ID NO: 156 - protein, 9 aa, artificial
  VL CDR3 of BCMA-16
FQGSHLPFT

SEQ ID NO: 157 - protein, 121 aa, artificial; identical to SEQ ID NO: 147
  VH of BCMA-16

SEQ ID NO: 158 - protein, 112 aa, artificial
  VL of BCMA-16
DIVMTQTPLSLSVTPGQPASISCKSSQSIVHSNGNTYLYWYLQKPGQPPQLLIYRVSNRFSGVPDRFSGSGSGTDFTLKISRVEAEDVGVYYCFQGSHLPFTFGQGTKLEIK

SEQ ID NO: 159 - protein, 248 aa, artificial
  BCMA-16 scFv
QVQLVQSGAEVKKPGTSVKVSCKASGYTFTSYWIHWVKQAPGQRLEWIGAIYPGNSDTHYNQKFQGRVTLTRDTSASTAYMELSSLRSEDSAVYYCTRSSYYYDGSLFADWGQGTLVTVSSGGGGSGGGGSGGGGSDIVMTQTPLSLSVTPGQPASISCKSSQSIVHSNGNTYLYWYLQKPGQPPQLLIYRVSNRFSGVPDRFSGSGSGTDFTLKISRVEAEDVGVYYCFQGSHLPFTFGQGTKLEIK

SEQ ID NO: 160 - protein, 503 aa, artificial
  BCMA-16 HL x CD3 HL bispecific molecule
QVQLVQSGAEVKKPGTSVKVSCKASGYTFTSYWIHWVKQAPGQRLEWIGAIYPGNSDTHYNQKFQGRVTLTRDTSASTAYMELSSLRSEDSAVYYCTRSSYYYDGSLFADWGQGTLVTVSSGGGGSGGGGSGGGGSDIVMTQTPLSLSVTPGQPASISCKSSQSIVHSNGNTYLYWYLQKPGQPPQLLIYRVSNRFSGVPDRFSGSGSGTDFTLKISRVEAEDVGVYYCFQGSHLPFTFGQGTKLEIKSGGGGSEVQLVESGGGLVQPGGSLKLSCAASGFTFNKYAMNWVRQAPGKGLEWVARIRSKYNNYATYYADSVKDRFTISRDDSKNTAYLQMNNLKTEDTAVYYCVRHGNFGNSYISYWAYWGQGTLVTVSSGGGGSGGGGSGGGGSQTVVTQEPSLTVSPGGTVTLTCGSSTGAVTSGNYPNWVQQKPGQAPRGLIGGTKFLAPGTPARFSGSLLGGKAALTLSGVQPEDEAEYYCVLWYSNRWVFGGGTKLTVL

SEQ ID NO: 161 - protein, 5 aa, artificial
  VH CDR1 of BCMA-17
NFDMA

SEQ ID NO: 162 - protein, 17 aa, artificial
  VH CDR2 of BCMA-17
SITTGADHAIYADSVKG

SEQ ID NO: 163 - protein, 12 aa, artificial
  VH CDR3 of BCMA-17
HGYYDGYHLFDY

SEQ ID NO: 164 - protein, 11 aa, artificial
  VL CDR1 of BCMA-17
RASQGISNYLN

SEQ ID NO: 165 - protein, 7 aa, artificial
  VL CDR2 of BCMA-17
YTSNLQS

SEQ ID NO: 166 - protein, 9 aa, artificial
  VL CDR3 of BCMA-17
QQYDISSYT

SEQ ID NO: 167 - protein, 121 aa, artificial
  VH of BCMA-17
EVQLVESGGGLVQPGGSLRLSCAASGFTFSNFDMAWVRQAPGKGLVWVSSITTGADHAIYADSVKGRFTISRDNAKNTLYLQMDSLRAEDTAVYYCVRHGYYDGYHLFDYWGQGTLVTVSS

SEQ ID NO: 168 - protein, 107 aa, artificial
  VL of BCMA-17
DIQMTQSPSSLSASVGDRVTITCRASQGISNYLNWYQQKPGKAPKPLIYYTSNLQSGVPSRFSGSGSGTDYTLTISSLQPEDFATYYCQQYDISSYTFGQGTKLEIK

SEQ ID NO: 169 - protein, 243 aa, artificial
  BCMA-17 scFv
EVQLVESGGGLVQPGGSLRLSCAASGFTFSNFDMAWVRQAPGKGLVWVSSITTGADHAIYADSVKGRFTISRDNAKNTLYLQMDSLRAEDTAVYYCVRHGYYDGYHLFDYWGQGTLVTVSSGGGGSGGGGSGGGGSDIQMTQSPSSLSASVGDRVTITCRASQGISNYLNWYQQKPGKAPKPLIYYTSNLQSGVPSRFSGSGSGTDYTLTISSLQPEDFATYYCQQYDISSYTFGQGTKLEIK

SEQ ID NO: 170 - protein, 498 aa, artificial
  BCMA-17 HL x CD3 HL bispecific molecule
EVQLVESGGGLVQPGGSLRLSCAASGFTFSNFDMAWVRQAPGKGLVWVSSITTGADHAIYADSVKGRFTISRDNAKNTLYLQMDSLRAEDTAVYYCVRHGYYDGYHLFDYWGQGTLVTVSSGGGGSGGGGSGGGGSDIQMTQSPSSLSASVGDRVTITCRASQGISNYLNWYQQKPGKAPKPLIYYTSNLQSGVPSRFSGSGSGTDYTLTISSLQPEDFATYYCQQYDISSYTFGQGTKLEIKSGGGGSEVQLVESGGGLVQPGGSLKLSCAASGFTFNKYAMNWVRQAPGKGLEWVARIRSKYNNYATYYADSVKDRFTISRDDSKNTAYLQMNNLKTEDTAVYYCVRHGNFGNSYISYWAYWGQGTLVTVSSGGGGSGGGGSGGGGSQTVVTQEPSLTVSPGGTVTLTCGSSTGAVTSGNYPNWVQQKPGQAPRGLIGGTKFLAPGTPARFSGSLLGGKAALTLSGVQPEDEAEYYCVLWYSNRWVFGGGTKLTVL

SEQ ID NO: 171 - protein, 5 aa, artificial
  VH CDR1 of BCMA-18
NFDMA

SEQ ID NO: 172 - protein, 17 aa, artificial
  VH CDR2 of BCMA-18
SITTGADHAIYADSVKG

SEQ ID NO: 173 - protein, 12 aa, artificial
  VH CDR3 of BCMA-18
HGYYDGYHLFDY

SEQ ID NO: 174 - protein, 11 aa, artificial
  VL CDR1 of BCMA-18
RASQGISNYLN

SEQ ID NO: 175 - protein, 7 aa, artificial
  VL CDR2 of BCMA-18
YTSNLQS

SEQ ID NO: 176 - protein, 9 aa, artificial
  VL CDR3 of BCMA-18
MGQTISSYT

SEQ ID NO: 177 - protein, 121 aa, artificial; identical to SEQ ID NO: 167
  VH of BCMA-18

SEQ ID NO: 178 - protein, 107 aa, artificial
  VL of BCMA-18
DIQMTQSPSSLSASVGDRVTITCRASQGISNYLNWYQQKPGKAPKPLIYYTSNLQSGVPSRFSGSGSGTDYTLTISSLQPEDFATYYCMGQTISSYTFGQGTKLEIK

SEQ ID NO: 179 - protein, 243 aa, artificial
  BCMA-18 scFv
EVQLVESGGGLVQPGGSLRLSCAASGFTFSNFDMAWVRQAPGKGLVWVSSITTGADHAIYADSVKGRFTISRDNAKNTLYLQMDSLRAEDTAVYYCVRHGYYDGYHLFDYWGQGTLVTVSSGGGGSGGGGSGGGGSDIQMTQSPSSLSASVGDRVTITCRASQGISNYLNWYQQKPGKAPKPLIYYTSNLQSGVPSRFSGSGSGTDYTLTISSLQPEDFATYYCMGQTISSYTFGQGTKLEIK

SEQ ID NO: 180 - protein, 498 aa, artificial
  BCMA-18 HL x CD3 HL bispecific molecule
EVQLVESGGGLVQPGGSLRLSCAASGFTFSNFDMAWVRQAPGKGLVWVSSITTGADHAIYADSVKGRFTISRDNAKNTLYLQMDSLRAEDTAVYYCVRHGYYDGYHLFDYWGQGTLVTVSSGGGGSGGGGSGGGGSDIQMTQSPSSLSASVGDRVTITCRASQGISNYLNWYQQKPGKAPKPLIYYTSNLQSGVPSRFSGSGSGTDYTLTISSLQPEDFATYYCMGQTISSYTFGQGTKLEIKSGGGGSEVQLVESGGGLVQPGGSLKLSCAASGFTFNKYAMNWVRQAPGKGLEWVARIRSKYNNYATYYADSVKDRFTISRDDSKNTAYLQMNNLKTEDTAVYYCVRHGNFGNSYISYWAYWGQGTLVTVSSGGGGSGGGGSGGGGSQTVVTQEPSLTVSPGGTVTLTCGSSTGAVTSGNYPNWVQQKPGQAPRGLIGGTKFLAPGTPARFSGSLLGGKAALTLSGVQPEDEAEYYCVLWYSNRWVFGGGTKLTVL

SEQ ID NO: 181 - protein, 5 aa, artificial
  VH CDR1 of BCMA-19
NFDMA

SEQ ID NO: 182 - protein, 17 aa, artificial
  VH CDR2 of BCMA-19
SITTGADHAIYADSVKG

SEQ ID NO: 183 - protein, 12 aa, artificial
  VH CDR3 of BCMA-19
HGYYDGYHLFDY

SEQ ID NO: 184 - protein, 11 aa, artificial
  VL CDR1 of BCMA-19
RASQGISNYLN

SEQ ID NO: 185 - protein, 7 aa, artificial
  VL CDR2 of BCMA-19
YTSNLQS

SEQ ID NO: 186 - protein, 9 aa, artificial
  VL CDR3 of BCMA-19
QQYDISSYT

SEQ ID NO: 187 - protein, 121 aa, artificial
  VH of BCMA-19
EVQLVESGGGLVQPGGSLRLSCAASGFTFSNFDMAWVRQAPGKGLVWVSSITTGADHAIYADSVKGRFTISRDNAKNTLYLQMNSLRAEDTAVYYCVRHGYYDGYHLFDYWGQGTLVTVSS

SEQ ID NO: 188 - protein, 107 aa, artificial; identical to SEQ ID NO: 168
  VL of BCMA-19

SEQ ID NO: 189 - protein, 243 aa, artificial
  BCMA-19 scFv
EVQLVESGGGLVQPGGSLRLSCAASGFTFSNFDMAWVRQAPGKGLVWVSSITTGADHAIYADSVKGRFTISRDNAKNTLYLQMNSLRAEDTAVYYCVRHGYYDGYHLFDYWGQGTLVTVSSGGGGSGGGGSGGGGSDIQMTQSPSSLSASVGDRVTITCRASQGISNYLNWYQQKPGKAPKPLIYYTSNLQSGVPSRFSGSGSGTDYTLTISSLQPEDFATYYCQQYDISSYTFGQGTKLEIK

SEQ ID NO: 190 - protein, 498 aa, artificial
  BCMA-19 HL x CD3 HL bispecific molecule
EVQLVESGGGLVQPGGSLRLSCAASGFTFSNFDMAWVRQAPGKGLVWVSSITTGADHAIYADSVKGRFTISRDNAKNTLYLQMNSLRAEDTAVYYCVRHGYYDGYHLFDYWGQGTLVTVSSGGGGSGGGGSGGGGSDIQMTQSPSSLSASVGDRVTITCRASQGISNYLNWYQQKPGKAPKPLIYYTSNLQSGVPSRFSGSGSGTDYTLTISSLQPEDFATYYCQQYDISSYTFGQGTKLEIKSGGGGSEVQLVESGGGLVQPGGSLKLSCAASGFTFNKYAMNWVRQAPGKGLEWVARIRSKYNNYATYYADSVKDRFTISRDDSKNTAYLQMNNLKTEDTAVYYCVRHGNFGNSYISYWAYWGQGTLVTVSSGGGGSGGGGSGGGGSQTVVTQEPSLTVSPGGTVTLTCGSSTGAVTSGNYPNWVQQKPGQAPRGLIGGTKFLAPGTPARFSGSLLGGKAALTLSGVQPEDEAEYYCVLWYSNRWVFGGGTKLTVL

SEQ ID NO: 191 - protein, 5 aa, artificial
  VH CDR1 of BCMA-20
NFDMA

SEQ ID NO: 192 - protein, 17 aa, artificial
  VH CDR2 of BCMA-20
SITTGADHAIYADSVKG

SEQ ID NO: 193 - protein, 12 aa, artificial
  VH CDR3 of BCMA-20
HGYYDGYHLFDY

SEQ ID NO: 194 - protein, 11 aa, artificial
  VL CDR1 of BCMA-20
RASQGISNYLN

SEQ ID NO: 195 - protein, 7 aa, artificial
  VL CDR2 of BCMA-20
YTSNLQS

SEQ ID NO: 196 - protein, 9 aa, artificial
  VL CDR3 of BCMA-20
MGQTISSYT

SEQ ID NO: 197 - protein, 121 aa, artificial; identical to SEQ ID NO: 187
  VH of BCMA-20

SEQ ID NO: 198 - protein, 107 aa, artificial; identical to SEQ ID NO: 178
  VL of BCMA-20

SEQ ID NO: 199 - protein, 243 aa, artificial
  BCMA-20 scFv
EVQLVESGGGLVQPGGSLRLSCAASGFTFSNFDMAWVRQAPGKGLVWVSSITTGADHAIYADSVKGRFTISRDNAKNTLYLQMNSLRAEDTAVYYCVRHGYYDGYHLFDYWGQGTLVTVSSGGGGSGGGGSGGGGSDIQMTQSPSSLSASVGDRVTITCRASQGISNYLNWYQQKPGKAPKPLIYYTSNLQSGVPSRFSGSGSGTDYTLTISSLQPEDFATYYCMGQTISSYTFGQGTKLEIK

SEQ ID NO: 200 - protein, 498 aa, artificial
  BCMA-20 HL x CD3 HL bispecific molecule
EVQLVESGGGLVQPGGSLRLSCAASGFTFSNFDMAWVRQAPGKGLVWVSSITTGADHAIYADSVKGRFTISRDNAKNTLYLQMNSLRAEDTAVYYCVRHGYYDGYHLFDYWGQGTLVTVSSGGGGSGGGGSGGGGSDIQMTQSPSSLSASVGDRVTITCRASQGISNYLNWYQQKPGKAPKPLIYYTSNLQSGVPSRFSGSGSGTDYTLTISSLQPEDFATYYCMGQTISSYTFGQGTKLEIKSGGGGSEVQLVESGGGLVQPGGSLKLSCAASGFTFNKYAMNWVRQAPGKGLEWVARIRSKYNNYATYYADSVKDRFTISRDDSKNTAYLQMNNLKTEDTAVYYCVRHGNFGNSYISYWAYWGQGTLVTVSSGGGGSGGGGSGGGGSQTVVTQEPSLTVSPGGTVTLTCGSSTGAVTSGNYPNWVQQKPGQAPRGLIGGTKFLAPGTPARFSGSLLGGKAALTLSGVQPEDEAEYYCVLWYSNRWVFGGGTKLTVL

SEQ ID NO: 201 - protein, 5 aa, artificial
  VH CDR1 of BCMA-21
NFDMA

SEQ ID NO: 202 - protein, 17 aa, artificial
  VH CDR2 of BCMA-21
SITTGADHAIYADSVKG

SEQ ID NO: 203 - protein, 12 aa, artificial
  VH CDR3 of BCMA-21
HGYYDGYHLFDY

SEQ ID NO: 204 - protein, 11 aa, artificial
  VL CDR1 of BCMA-21
RASQGISNYLN

SEQ ID NO: 205 - protein, 7 aa, artificial
  VL CDR2 of BCMA-21
YTSNLQS

SEQ ID NO: 206 - protein, 9 aa, artificial
  VL CDR3 of BCMA-21
QQYDISSYT

SEQ ID NO: 207 - protein, 121 aa, artificial
  VH of BCMA-21
EVQLVESGGGLVQPGGSLRLSCAASGFTFSNFDMAWVRQAPGKGLVWVSSITTGADHAIYADSVKGRFTISRDNAKNTLYLQMDSLRSEDTAVYYCVRHGYYDGYHLFDYWGQGTLVTVSS

SEQ ID NO: 208 - protein, 107 aa, artificial
  VL of BCMA-21
DIQMTQSPSSLSASVGDRVTISCRASQGISNYLNWYQQKPGKAPKPLIYYTSNLQSGVPSRFSGSGSGTDYTLTISSLQPEDFATYYCQQYDISSYTFGQGTKLEIK

SEQ ID NO: 209 - protein, 243 aa, artificial
  BCMA-21 scFv
EVQLVESGGGLVQPGGSLRLSCAASGFTFSNFDMAWVRQAPGKGLVWVSSITTGADHAIYADSVKGRFTISRDNAKNTLYLQMDSLRSEDTAVYYCVRHGYYDGYHLFDYWGQGTLVTVSSGGGGSGGGGSGGGGSDIQMTQSPSSLSASVGDRVTISCRASQGISNYLNWYQQKPGKAPKPLIYYTSNLQSGVPSRFSGSGSGTDYTLTISSLQPEDFATYYCQQYDISSYTFGQGTKLEIK

SEQ ID NO: 210 - protein, 498 aa, artificial
  BCMA-21 HL x CD3 HL bispecific molecule
EVQLVESGGGLVQPGGSLRLSCAASGFTFSNFDMAWVRQAPGKGLVWVSSITTGADHAIYADSVKGRFTISRDNAKNTLYLQMDSLRSEDTAVYYCVRHGYYDGYHLFDYWGQGTLVTVSSGGGGSGGGGSGGGGSDIQMTQSPSSLSASVGDRVTISCRASQGISNYLNWYQQKPGKAPKPLIYYTSNLQSGVPSRFSGSGSGTDYTLTISSLQPEDFATYYCQQYDISSYTFGQGTKLEIKSGGGGSEVQLVESGGGLVQPGGSLKLSCAASGFTFNKYAMNWVRQAPGKGLEWVARIRSKYNNYATYYADSVKDRFTISRDDSKNTAYLQMNNLKTEDTAVYYCVRHGNFGNSYISYWAYWGQGTLVTVSSGGGGSGGGGSGGGGSQTVVTQEPSLTVSPGGTVTLTCGSSTGAVTSGNYPNWVQQKPGQAPRGLIGGTKFLAPGTPARFSGSLLGGKAALTLSGVQPEDEAEYYCVLWYSNRWVFGGGTKLTVL

SEQ ID NO: 211 - protein, 5 aa, artificial
  VH CDR1 of BCMA-22
NFDMA

SEQ ID NO: 212 - protein, 17 aa, artificial
  VH CDR2 of BCMA-22
SITTGADHAIYAESVKG

SEQ ID NO: 213 - protein, 12 aa, artificial
  VH CDR3 of BCMA-22
HGYYDGYHLFDY

SEQ ID NO: 214 - protein, 11 aa, artificial
  VL CDR1 of BCMA-22
RASQGISNYLN

SEQ ID NO: 215 - protein, 7 aa, artificial
  VL CDR2 of BCMA-22
YTSNLQS

SEQ ID NO: 216 - protein, 9 aa, artificial
  VL CDR3 of BCMA-22
MGQTISSYT

SEQ ID NO: 217 - protein, 121 aa, artificial
  VH of BCMA-22
EVQLVESGGGLVQPGGSLRLSCAASGFTFSNFDMAWVRQAPGKGLVWVSSITTGADHAIYAESVKGRFTISRDNAKNTLYLQMDSLRSEDTAVYYCVRHGYYDGYHLFDYWGQGTLVTVSS

SEQ ID NO: 218 - protein, 107 aa, artificial
  VL of BCMA-22
DIQMTQSPSSLSASVGDRVTISCRASQGISNYLNWYQQKPGKAPKPLIYYTSNLQSGVPSRFSGSGSGTDYTLTISSLQPEDFATYYCMGQTISSYTFGQGTKLEIK

SEQ ID NO: 219 - protein, 243 aa, artificial
  BCMA-22 scFv
EVQLVESGGGLVQPGGSLRLSCAASGFTFSNFDMAWVRQAPGKGLVWVSSITTGADHAIYAESVKGRFTISRDNAKNTLYLQMDSLRSEDTAVYYCVRHGYYDGYHLFDYWGQGTLVTVSSGGGGSGGGGSGGGGSDIQMTQSPSSLSASVGDRVTISCRASQGISNYLNWYQQKPGKAPKPLIYYTSNLQSGVPSRFSGSGSGTDYTLTISSLQPEDFATYYCMGQTISSYTFGQGTKLEIK

SEQ ID NO: 220 - protein, 498 aa, artificial
  BCMA-22 HL x CD3 HL bispecific molecule
EVQLVESGGGLVQPGGSLRLSCAASGFTFSNFDMAWVRQAPGKGLVWVSSITTGADHAIYAESVKGRFTISRDNAKNTLYLQMDSLRSEDTAVYYCVRHGYYDGYHLFDYWGQGTLVTVSSGGGGSGGGGSGGGGSDIQMTQSPSSLSASVGDRVTISCRASQGISNYLNWYQQKPGKAPKPLIYYTSNLQSGVPSRFSGSGSGTDYTLTISSLQPEDFATYYCMGQTISSYTFGQGTKLEIKSGGGGSEVQLVESGGGLVQPGGSLKLSCAASGFTFNKYAMNWVRQAPGKGLEWVARIRSKYNNYATYYADSVKDRFTISRDDSKNTAYLQMNNLKTEDTAVYYCVRHGNFGNSYISYWAYWGQGTLVTVSSGGGGSGGGGSGGGGSQTVVTQEPSLTVSPGGTVTLTCGSSTGAVTSGNYPNWVQQKPGQAPRGLIGGTKFLAPGTPARFSGSLLGGKAALTLSGVQPEDEAEYYCVLWYSNRWVFGGGTKLTVL

SEQ ID NO: 221 - protein, 5 aa, artificial
  VH CDR1 of BCMA-23
NFDMA

SEQ ID NO: 222 - protein, 17 aa, artificial
  VH CDR2 of BCMA-23
SITTGADHAIYADSVKG

SEQ ID NO: 223 - protein, 12 aa, artificial
  VH CDR3 of BCMA-23
HGYYDGYHLFDY

SEQ ID NO: 224 - protein, 11 aa, artificial
  VL CDR1 of BCMA-23
RASQGISNYLN

SEQ ID NO: 225 - protein, 7 aa, artificial
  VL CDR2 of BCMA-23
YTSNLQS

SEQ ID NO: 226 - protein, 9 aa, artificial
  VL CDR3 of BCMA-23
MGQTISSYT

SEQ ID NO: 227 - protein, 121 aa, artificial
  VH of BCMA-23
EVQLVESGGGLVQPGRSLRLSCAASGFTFSNFDMAWVRQAPAKGLEWVSSITTGADHAIYADSVKGRFTISRDNAKNTLYLQMNSLRAEDTAVYYCVRHGYYDGYHLFDYWGQGTLVTVSS

SEQ ID NO: 228 - protein, 107 aa, artificial
  VL of BCMA-23
DIQMTQSPSSLSASVGDRVTITCRASQGISNYLNWYQQKPGKAPKPLIYYTSNLQSGVPSRFSGSGSGTDFTLTISSLQPEDFATYYCMGQTISSYTFGQGTKLEIK

SEQ ID NO: 229 - protein, 243 aa, artificial
  BCMA-23 scFv
EVQLVESGGGLVQPGRSLRLSCAASGFTFSNFDMAWVRQAPAKGLEWVSSITTGADHAIYADSVKGRFTISRDNAKNTLYLQMNSLRAEDTAVYYCVRHGYYDGYHLFDYWGQGTLVTVSSGGGGSGGGGSGGGGSDIQMTQSPSSLSASVGDRVTITCRASQGISNYLNWYQQKPGKAPKPLIYYTSNLQSGVPSRFSGSGSGTDFTLTISSLQPEDFATYYCMGQTISSYTFGQGTKLEIK

SEQ ID NO: 230 - protein, 498 aa, artificial
  BCMA-23 HL x CD3 HL bispecific molecule
EVQLVESGGGLVQPGRSLRLSCAASGFTFSNFDMAWVRQAPAKGLEWVSSITTGADHAIYADSVKGRFTISRDNAKNTLYLQMNSLRAEDTAVYYCVRHGYYDGYHLFDYWGQGTLVTVSSGGGGSGGGGSGGGGSDIQMTQSPSSLSASVGDRVTITCRASQGISNYLNWYQQKPGKAPKPLIYYTSNLQSGVPSRFSGSGSGTDFTLTISSLQPEDFATYYCMGQTISSYTFGQGTKLEIKSGGGGSEVQLVESGGGLVQPGGSLKLSCAASGFTFNKYAMNWVRQAPGKGLEWVARIRSKYNNYATYYADSVKDRFTISRDDSKNTAYLQMNNLKTEDTAVYYCVRHGNFGNSYISYWAYWGQGTLVTVSSGGGGSGGGGSGGGGSQTVVTQEPSLTVSPGGTVTLTCGSSTGAVTSGNYPNWVQQKPGQAPRGLIGGTKFLAPGTPARFSGSLLGGKAALTLSGVQPEDEAEYYCVLWYSNRWVFGGGTKLTVL

SEQ ID NO: 231 - protein, 5 aa, artificial
  VH CDR1 of BCMA-24
DYYIN

SEQ ID NO: 232 - protein, 17 aa, artificial
  VH CDR2 of BCMA-24
WIYFASGNSEYNQKFTG

SEQ ID NO: 233 - protein, 10 aa, artificial
  VH CDR3 of BCMA-24
LYDYDWYFDV

SEQ ID NO: 234 - protein, 16 aa, artificial
  VL CDR1 of BCMA-24
KSSQSLVHSNGNTYLH

SEQ ID NO: 235 - protein, 7 aa, artificial
  VL CDR2 of BCMA-24
KVSNRFS

SEQ ID NO: 236 - protein, 9 aa, artificial
  VL CDR3 of BCMA-24
AETSHVPWT

SEQ ID NO: 237 - protein, 119 aa, artificial
  VH of BCMA-24
QVQLVQSGAEVKKPGASVKVSCKASGYSFPDYYINWVRQAPGQGLEWMGWIYFASGNSEYNQKFTGRVTMTRDTSSSTAYMELSSLRSEDTAVYFCASLYDYDWYFDVWGQGTMVTVSS

SEQ ID NO: 238 - protein, 112 aa, artificial
  VL of BCMA-24
DIVMTQTPLSLSVTPGQPASISCKSSQSLVHSNGNTYLHWYLQKPGQSPQLLIYKVSNRFSGVPDRFSGSGSGTDFTLKINRVEAEDVGVYYCAETSHVPWTFGQGTKLEIK

SEQ ID NO: 239 - protein, 246 aa, artificial
  BCMA-24 scFv
QVQLVQSGAEVKKPGASVKVSCKASGYSFPDYYINWVRQAPGQGLEWMGWIYFASGNSEYNQKFTGRVTMTRDTSSSTAYMELSSLRSEDTAVYFCASLYDYDWYFDVWGQGTMVTVSSGGGGSGGGGSGGGGSDIVMTQTPLSLSVTPGQPASISCKSSQSLVHSNGNTYLHWYLQKPGQSPQLLIYKVSNRFSGVPDRFSGSGSGTDFTLKINRVEAEDVGVYYCAETSHVPWTFGQGTKLEIK

SEQ ID NO: 240 - protein, 501 aa, artificial
  BCMA-24 HL x CD3 HL bispecific molecule
QVQLVQSGAEVKKPGASVKVSCKASGYSFPDYYINWVRQAPGQGLEWMGWIYFASGNSEYNQKFTGRVTMTRDTSSSTAYMELSSLRSEDTAVYFCASLYDYDWYFDVWGQGTMVTVSSGGGGSGGGGSGGGGSDIVMTQTPLSLSVTPGQPASISCKSSQSLVHSNGNTYLHWYLQKPGQSPQLLIYKVSNRFSGVPDRFSGSGSGTDFTLKINRVEAEDVGVYYCAETSHVPWTFGQGTKLEIKSGGGGSEVQLVESGGGLVQPGGSLKLSCAASGFTFNKYAMNWVRQAPGKGLEWVARIRSKYNNYATYYADSVKDRFTISRDDSKNTAYLQMNNLKTEDTAVYYCVRHGNFGNSYISYWAYWGQGTLVTVSSGGGGSGGGGSGGGGSQTVVTQEPSLTVSPGGTVTLTCGSSTGAVTSGNYPNWVQQKPGQAPRGLIGGTKFLAPGTPARFSGSLLGGKAALTLSGVQPEDEAEYYCVLWYSNRWVFGGGTKLTVL

SEQ ID NO: 241 - protein, 5 aa, artificial
  VH CDR1 of BCMA-25
DYYIN

SEQ ID NO: 242 - protein, 17 aa, artificial
  VH CDR2 of BCMA-25
WIYFASGNSEYNQKFTG

SEQ ID NO: 243 - protein, 10 aa, artificial
  VH CDR3 of BCMA-25
LYDYDWYFDV

SEQ ID NO: 244 - protein, 16 aa, artificial
  VL CDR1 of BCMA-25
KSSQSLVHSNGNTYLH

SEQ ID NO: 245 - protein, 7 aa, artificial
  VL CDR2 of BCMA-25
KVSNRFS

SEQ ID NO: 246 - protein, 9 aa, artificial
  VL CDR3 of BCMA-25
LTTSHVPWT

SEQ ID NO: 247 - protein, 119 aa, artificial; identical to SEQ ID NO: 237
  VH of BCMA-25

SEQ ID NO: 248 - protein, 112 aa, artificial
  VL of BCMA-25
DIVMTQTPLSLSVTPGQPASISCKSSQSLVHSNGNTYLHWYLQKPGQSPQLLIYKVSNRFSGVPDRFSGSGSGTDFTLKINRVEAEDVGVYYCLTTSHVPWTFGQGTKLEIK

SEQ ID NO: 249 - protein, 246 aa, artificial
  BCMA-25 scFv
QVQLVQSGAEVKKPGASVKVSCKASGYSFPDYYINWVRQAPGQGLEWMGWIYFASGNSEYNQKFTGRVTMTRDTSSSTAYMELSSLRSEDTAVYFCASLYDYDWYFDVWGQGTMVTVSSGGGGSGGGGSGGGGSDIVMTQTPLSLSVTPGQPASISCKSSQSLVHSNGNTYLHWYLQKPGQSPQLLIYKVSNRFSGVPDRFSGSGSGTDFTLKINRVEAEDVGVYYCLTTSHVPWTFGQGTKLEIK

SEQ ID NO: 250 - protein, 501 aa, artificial
  BCMA-25 HL x CD3 HL bispecific molecule
QVQLVQSGAEVKKPGASVKVSCKASGYSFPDYYINWVRQAPGQGLEWMGWIYFASGNSEYNQKFTGRVTMTRDTSSSTAYMELSSLRSEDTAVYFCASLYDYDWYFDVWGQGTMVTVSSGGGGSGGGGSGGGGSDIVMTQTPLSLSVTPGQPASISCKSSQSLVHSNGNTYLHWYLQKPGQSPQLLIYKVSNRFSGVPDRFSGSGSGTDFTLKINRVEAEDVGVYYCLTTSHVPWTFGQGTKLEIKSGGGGSEVQLVESGGGLVQPGGSLKLSCAASGFTFNKYAMNWVRQAPGKGLEWVARIRSKYNNYATYYADSVKDRFTISRDDSKNTAYLQMNNLKTEDTAVYYCVRHGNFGNSYISYWAYWGQGTLVTVSSGGGGSGGGGSGGGGSQTVVTQEPSLTVSPGGTVTLTCGSSTGAVTSGNYPNWVQQKPGQAPRGLIGGTKFLAPGTPARFSGSLLGGKAALTLSGVQPEDEAEYYCVLWYSNRWVFGGGTKLTVL

SEQ ID NO: 251 - protein, 5 aa, artificial
  VH CDR1 of BCMA-26
DYYIN

SEQ ID NO: 252 - protein, 17 aa, artificial
  VH CDR2 of BCMA-26
WIYFASGNSEYNQKFTG

SEQ ID NO: 253 - protein, 10 aa, artificial
  VH CDR3 of BCMA-26
LYDYDWYFDV

SEQ ID NO: 254 - protein, 16 aa, artificial
  VL CDR1 of BCMA-26
KSSQSLVHSNGNTYLH

SEQ ID NO: 255 - protein, 7 aa, artificial
  VL CDR2 of BCMA-26
KVSNRFS

SEQ ID NO: 256 - protein, 9 aa, artificial
  VL CDR3 of BCMA-26
AETSHVPWT

SEQ ID NO: 257 - protein, 119 aa, artificial; identical to SEQ ID NO: 237
  VH of BCMA-26

SEQ ID NO: 258 - protein, 112 aa, artificial
  VL of BCMA-26
DIVMTQTPLSLSVTPGQPASISCKSSQSLVHSNGNTYLHWYLQKPGQSPQLLIYKVSNRFSGVPDRFSGSGSGTDFTLKISRVEAEDVGVYYCAETSHVPWTFGQGTKLEIK

SEQ ID NO: 259 - protein, 246 aa, artificial
  BCMA-26 scFv
QVQLVQSGAEVKKPGASVKVSCKASGYSFPDYYINWVRQAPGQGLEWMGWIYFASGNSEYNQKFTGRVTMTRDTSSSTAYMELSSLRSEDTAVYFCASLYDYDWYFDVWGQGTMVTVSSGGGGSGGGGSGGGGSDIVMTQTPLSLSVTPGQPASISCKSSQSLVHSNGNTYLHWYLQKPGQSPQLLIYKVSNRFSGVPDRFSGSGSGTDFTLKISRVEAEDVGVYYCAETSHVPWTFGQGTKLEIK

SEQ ID NO: 260 - protein, 501 aa, artificial
  BCMA-26 HL x CD3 HL bispecific molecule
QVQLVQSGAEVKKPGASVKVSCKASGYSFPDYYINWVRQAPGQGLEWMGWIYFASGNSEYNQKFTGRVTMTRDTSSSTAYMELSSLRSEDTAVYFCASLYDYDWYFDVWGQGTMVTVSSGGGGSGGGGSGGGGSDIVMTQTPLSLSVTPGQPASISCKSSQSLVHSNGNTYLHWYLQKPGQSPQLLIYKVSNRFSGVPDRFSGSGSGTDFTLKISRVEAEDVGVYYCAETSHVPWTFGQGTKLEIKSGGGGSEVQLVESGGGLVQPGGSLKLSCAASGFTFNKYAMNWVRQAPGKGLEWVARIRSKYNNYATYYADSVKDRFTISRDDSKNTAYLQMNNLKTEDTAVYYCVRHGNFGNSYISYWAYWGQGTLVTVSSGGGGSGGGGSGGGGSQTVVTQEPSLTVSPGGTVTLTCGSSTGAVTSGNYPNWVQQKPGQAPRGLIGGTKFLAPGTPARFSGSLLGGKAALTLSGVQPEDEAEYYCVLWYSNRWVFGGGTKLTVL

SEQ ID NO: 261 - protein, 5 aa, artificial
  VH CDR1 of BCMA-27
DYYIN

SEQ ID NO: 262 - protein, 17 aa, artificial
  VH CDR2 of BCMA-27
WIYFASGNSEYNQKFTG

SEQ ID NO: 263 - protein, 10 aa, artificial
  VH CDR3 of BCMA-27
LYDYDWYFDV

SEQ ID NO: 264 - protein, 16 aa, artificial
  VL CDR1 of BCMA-27
KSSQSLVHSNGNTYLH

SEQ ID NO: 265 - protein, 7 aa, artificial
  VL CDR2 of BCMA-27
KVSNRFS

SEQ ID NO: 266 - protein, 9 aa, artificial
  VL CDR3 of BCMA-27
LTTSHVPWT

SEQ ID NO: 267 - protein, 119 aa, artificial; identical to SEQ ID NO: 237
  VH of BCMA-27

SEQ ID NO: 268 - protein, 112 aa, artificial
  VL of BCMA-27
DIVMTQTPLSLSVTPGQPASISCKSSQSLVHSNGNTYLHWYLQKPGQSPQLLIYKVSNRFSGVPDRFSGSGSGTDFTLKISRVEAEDVGVYYCLTTSHVPWTFGQGTKLEIK

SEQ ID NO: 269 - protein, 246 aa, artificial
  BCMA-27 scFv
QVQLVQSGAEVKKPGASVKVSCKASGYSFPDYYINWVRQAPGQGLEWMGWIYFASGNSEYNQKFTGRVTMTRDTSSSTAYMELSSLRSEDTAVYFCASLYDYDWYFDVWGQGTMVTVSSGGGGSGGGGSGGGGSDIVMTQTPLSLSVTPGQPASISCKSSQSLVHSNGNTYLHWYLQKPGQSPQLLIYKVSNRFSGVPDRFSGSGSGTDFTLKISRVEAEDVGVYYCLTTSHVPWTFGQGTKLEIK

SEQ ID NO: 270 - protein, 501 aa, artificial
  BCMA-27 HL x CD3 HL bispecific molecule
QVQLVQSGAEVKKPGASVKVSCKASGYSFPDYYINWVRQAPGQGLEWMGWIYFASGNSEYNQKFTGRVTMTRDTSSSTAYMELSSLRSEDTAVYFCASLYDYDWYFDVWGQGTMVTVSSGGGGSGGGGSGGGGSDIVMTQTPLSLSVTPGQPASISCKSSQSLVHSNGNTYLHWYLQKPGQSPQLLIYKVSNRFSGVPDRFSGSGSGTDFTLKISRVEAEDVGVYYCLTTSHVPWTFGQGTKLEIKSGGGGSEVQLVESGGGLVQPGGSLKLSCAASGFTFNKYAMNWVRQAPGKGLEWVARIRSKYNNYATYYADSVKDRFTISRDDSKNTAYLQMNNLKTEDTAVYYCVRHGNFGNSYISYWAYWGQGTLVTVSSGGGGSGGGGSGGGGSQTVVTQEPSLTVSPGGTVTLTCGSSTGAVTSGNYPNWVQQKPGQAPRGLIGGTKFLAPGTPARFSGSLLGGKAALTLSGVQPEDEAEYYCVLWYSNRWVFGGGTKLTVL

SEQ ID NO: 271 - protein, 5 aa, artificial
  VH CDR1 of BCMA-28
DYYIN

SEQ ID NO: 272 - protein, 17 aa, artificial
  VH CDR2 of BCMA-28
WIYFASGNSEYNQKFTG

SEQ ID NO: 273 - protein, 10 aa, artificial
  VH CDR3 of BCMA-28
LYDYDWYFDV

SEQ ID NO: 274 - protein, 16 aa, artificial
  VL CDR1 of BCMA-28
KSSQSLVHSNGNTYLH

SEQ ID NO: 275 - protein, 7 aa, artificial
  VL CDR2 of BCMA-28
KVSNRFS

SEQ ID NO: 276 - protein, 9 aa, artificial
  VL CDR3 of BCMA-28
AETSHVPWT

SEQ ID NO: 277 - protein, 119 aa, artificial; identical to SEQ ID NO: 237
  VH of BCMA-28

SEQ ID NO: 278 - protein, 112 aa, artificial
  VL of BCMA-28
DIVMTQTPLSLSVSPGQPASISCKSSQSLVHSNGNTYLHWYLQKPGQSPQLLIYKVSNRFSGVPDRFSGSGSGTDFTLKISRVEAEDVGVYYCAETSHVPWTFGQGTKLEIK

SEQ ID NO: 279 - protein, 246 aa, artificial
  BCMA-28 scFv
QVQLVQSGAEVKKPGASVKVSCKASGYSFPDYYINWVRQAPGQGLEWMGWIYFASGNSEYNQKFTGRVTMTRDTSSSTAYMELSSLRSEDTAVYFCASLYDYDWYFDVWGQGTMVTVSSGGGGSGGGGSGGGGSDIVMTQTPLSLSVSPGQPASISCKSSQSLVHSNGNTYLHWYLQKPGQSPQLLIYKVSNRFSGVPDRFSGSGSGTDFTLKISRVEAEDVGVYYCAETSHVPWTFGQGTKLEIK

SEQ ID NO: 280 - protein, 501 aa, artificial
  BCMA-28 HL x CD3 HL bispecific molecule
QVQLVQSGAEVKKPGASVKVSCKASGYSFPDYYINWVRQAPGQGLEWMGWIYFASGNSEYNQKFTGRVTMTRDTSSSTAYMELSSLRSEDTAVYFCASLYDYDWYFDVWGQGTMVTVSSGGGGSGGGGSGGGGSDIVMTQTPLSLSVSPGQPASISCKSSQSLVHSNGNTYLHWYLQKPGQSPQLLIYKVSNRFSGVPDRFSGSGSGTDFTLKISRVEAEDVGVYYCAETSHVPWTFGQGTKLEIKSGGGGSEVQLVESGGGLVQPGGSLKLSCAASGFTFNKYAMNWVRQAPGKGLEWVARIRSKYNNYATYYADSVKDRFTISRDDSKNTAYLQMNNLKTEDTAVYYCVRHGNFGNSYISYWAYWGQGTLVTVSSGGGGSGGGGSGGGGSQTVVTQEPSLTVSPGGTVTLTCGSSTGAVTSGNYPNWVQQKPGQAPRGLIGGTKFLAPGTPARFSGSLLGGKAALTLSGVQPEDEAEYYCVLWYSNRWVFGGGTKLTVL

SEQ ID NO: 281 - protein, 5 aa, artificial
  VH CDR1 of BCMA-29
DYYIN

SEQ ID NO: 282 - protein, 17 aa, artificial
  VH CDR2 of BCMA-29
WIYFASGNSEYNQKFTG

SEQ ID NO: 283 - protein, 10 aa, artificial
  VH CDR3 of BCMA-29
LYDYDWYFDV

SEQ ID NO: 284 - protein, 16 aa, artificial
  VL CDR1 of BCMA-29
KSSQSLVHSNGNTYLH

SEQ ID NO: 285 - protein, 7 aa, artificial
  VL CDR2 of BCMA-29
KVSNRFS

SEQ ID NO: 286 - protein, 9 aa, artificial
  VL CDR3 of BCMA-29
LTTSHVPWT

SEQ ID NO: 287 - protein, 119 aa, artificial; identical to SEQ ID NO: 237
  VH of BCMA-29

SEQ ID NO: 288 - protein, 112 aa, artificial
  VL of BCMA-29
DIVMTQTPLSLSVSPGQPASISCKSSQSLVHSNGNTYLHWYLQKPGQSPQLLIYKVSNRFSGVPDRFSGSGSGTDFTLKISRVEAEDVGVYYCLTTSHVPWTFGQGTKLEIK

SEQ ID NO: 289 - protein, 246 aa, artificial
  BCMA-29 scFv
QVQLVQSGAEVKKPGASVKVSCKASGYSFPDYYINWVRQAPGQGLEWMGWIYFASGNSEYNQKFTGRVTMTRDTSSSTAYMELSSLRSEDTAVYFCASLYDYDWYFDVWGQGTMVTVSSGGGGSGGGGSGGGGSDIVMTQTPLSLSVSPGQPASISCKSSQSLVHSNGNTYLHWYLQKPGQSPQLLIYKVSNRFSGVPDRFSGSGSGTDFTLKISRVEAEDVGVYYCLTTSHVPWTFGQGTKLEIK

SEQ ID NO: 290 - protein, 501 aa, artificial
  BCMA-29 HL x CD3 HL bispecific molecule
QVQLVQSGAEVKKPGASVKVSCKASGYSFPDYYINWVRQAPGQGLEWMGWIYFASGNSEYNQKFTGRVTMTRDTSSSTAYMELSSLRSEDTAVYFCASLYDYDWYFDVWGQGTMVTVSSGGGGSGGGGSGGGGSDIVMTQTPLSLSVSPGQPASISCKSSQSLVHSNGNTYLHWYLQKPGQSPQLLIYKVSNRFSGVPDRFSGSGSGTDFTLKISRVEAEDVGVYYCLTTSHVPWTFGQGTKLEIKSGGGGSEVQLVESGGGLVQPGGSLKLSCAASGFTFNKYAMNWVRQAPGKGLEWVARIRSKYNNYATYYADSVKDRFTISRDDSKNTAYLQMNNLKTEDTAVYYCVRHGNFGNSYISYWAYWGQGTLVTVSSGGGGSGGGGSGGGGSQTVVTQEPSLTVSPGGTVTLTCGSSTGAVTSGNYPNWVQQKPGQAPRGLIGGTKFLAPGTPARFSGSLLGGKAALTLSGVQPEDEAEYYCVLWYSNRWVFGGGTKLTVL

SEQ ID NO: 291 - protein, 5 aa, artificial
  VH CDR1 of BCMA-30
DYYIN

SEQ ID NO: 292 - protein, 17 aa, artificial
  VH CDR2 of BCMA-30
WIYFASGNSEYNQKFTG

SEQ ID NO: 293 - protein, 10 aa, artificial
  VH CDR3 of BCMA-30
LYDYDWYFDV

SEQ ID NO: 294 - protein, 16 aa, artificial
  VL CDR1 of BCMA-30
KSSQSLVHSNGNTYLH

SEQ ID NO: 295 - protein, 7 aa, artificial
  VL CDR2 of BCMA-30
KVSNRFS

SEQ ID NO: 296 - protein, 9 aa, artificial
  VL CDR3 of BCMA-30
AETSHVPWT

SEQ ID NO: 297 - protein, 119 aa, artificial; identical to SEQ ID NO: 237
  VH of BCMA-30

SEQ ID NO: 298 - protein, 112 aa, artificial
  VL of BCMA-30
DIVMTQTPLSLSVTPGEPASISCKSSQSLVHSNGNTYLHWYLQKPGQSPQLLIYKVSNRFSGVPDRFSGSGSGADFTLKISRVEAEDVGVYYCAETSHVPWTFGQGTKLEIK

SEQ ID NO: 299 - protein, 246 aa, artificial
  BCMA-30 scFv
QVQLVQSGAEVKKPGASVKVSCKASGYSFPDYYINWVRQAPGQGLEWMGWIYFASGNSEYNQKFTGRVTMTRDTSSSTAYMELSSLRSEDTAVYFCASLYDYDWYFDVWGQGTMVTVSSGGGGSGGGGSGGGGSDIVMTQTPLSLSVTPGEPASISCKSSQSLVHSNGNTYLHWYLQKPGQSPQLLIYKVSNRFSGVPDRFSGSGSGADFTLKISRVEAEDVGVYYCAETSHVPWTFGQGTKLEIK

SEQ ID NO: 300 - protein, 501 aa, artificial
  BCMA-30 HL x CD3 HL bispecific molecule
QVQLVQSGAEVKKPGASVKVSCKASGYSFPDYYINWVRQAPGQGLEWMGWIYFASGNSEYNQKFTGRVTMTRDTSSSTAYMELSSLRSEDTAVYFCASLYDYDWYFDVWGQGTMVTVSSGGGGSGGGGSGGGGSDIVMTQTPLSLSVTPGEPASISCKSSQSLVHSNGNTYLHWYLQKPGQSPQLLIYKVSNRFSGVPDRFSGSGSGADFTLKISRVEAEDVGVYYCAETSHVPWTFGQGTKLEIKSGGGGSEVQLVESGGGLVQPGGSLKLSCAASGFTFNKYAMNWVRQAPGKGLEWVARIRSKYNNYATYYADSVKDRFTISRDDSKNTAYLQMNNLKTEDTAVYYCVRHGNFGNSYISYWAYWGQGTLVTVSSGGGGSGGGGSGGGGSQTVVTQEPSLTVSPGGTVTLTCGSSTGAVTSGNYPNWVQQKPGQAPRGLIGGTKFLAPGTPARFSGSLLGGKAALTLSGVQPEDEAEYYCVLWYSNRWVFGGGTKLTVL

SEQ ID NO: 301 - protein, 5 aa, artificial
  VH CDR1 of BCMA-31
DYYIN

SEQ ID NO: 302 - protein, 17 aa, artificial
  VH CDR2 of BCMA-31
WIYFASGNSEYNQKFTG

SEQ ID NO: 303 - protein, 10 aa, artificial
  VH CDR3 of BCMA-31
LYDYDWYFDV

SEQ ID NO: 304 - protein, 16 aa, artificial
  VL CDR1 of BCMA-31
KSSQSLVHSNGNTYLH

SEQ ID NO: 305 - protein, 7 aa, artificial
  VL CDR2 of BCMA-31
KVSNRFS

SEQ ID NO: 306 - protein, 9 aa, artificial
  VL CDR3 of BCMA-31
LTTSHVPWT

SEQ ID NO: 307 - protein, 119 aa, artificial; identical to SEQ ID NO: 237
  VH of BCMA-31

SEQ ID NO: 308 - protein, 112 aa, artificial
  VL of BCMA-31
DIVMTQTPLSLSVTPGEPASISCKSSQSLVHSNGNTYLHWYLQKPGQSPQLLIYKVSNRFSGVPDRFSGSGSGADFTLKISRVEAEDVGVYYCLTTSHVPWTFGQGTKLEIK

SEQ ID NO: 309 - protein, 246 aa, artificial
  BCMA-31 scFv
QVQLVQSGAEVKKPGASVKVSCKASGYSFPDYYINWVRQAPGQGLEWMGWIYFASGNSEYNQKFTGRVTMTRDTSSSTAYMELSSLRSEDTAVYFCASLYDYDWYFDVWGQGTMVTVSSGGGGSGGGGSGGGGSDIVMTQTPLSLSVTPGEPASISCKSSQSLVHSNGNTYLHWYLQKPGQSPQLLIYKVSNRFSGVPDRFSGSGSGADFTLKISRVEAEDVGVYYCLTTSHVPWTFGQGTKLEIK

SEQ ID NO: 310 - protein, 501 aa, artificial
  BCMA-31 HL x CD3 HL bispecific molecule
QVQLVQSGAEVKKPGASVKVSCKASGYSFPDYYINWVRQAPGQGLEWMGWIYFASGNSEYNQKFTGRVTMTRDTSSSTAYMELSSLRSEDTAVYFCASLYDYDWYFDVWGQGTMVTVSSGGGGSGGGGSGGGGSDIVMTQTPLSLSVTPGEPASISCKSSQSLVHSNGNTYLHWYLQKPGQSPQLLIYKVSNRFSGVPDRFSGSGSGADFTLKISRVEAEDVGVYYCLTTSHVPWTFGQGTKLEIKSGGGGSEVQLVESGGGLVQPGGSLKLSCAASGFTFNKYAMNWVRQAPGKGLEWVARIRSKYNNYATYYADSVKDRFTISRDDSKNTAYLQMNNLKTEDTAVYYCVRHGNFGNSYISYWAYWGQGTLVTVSSGGGGSGGGGSGGGGSQTVVTQEPSLTVSPGGTVTLTCGSSTGAVTSGNYPNWVQQKPGQAPRGLIGGTKFLAPGTPARFSGSLLGGKAALTLSGVQPEDEAEYYCVLWYSNRWVFGGGTKLTVL

SEQ ID NO: 311 - protein, 5 aa, artificial
  VH CDR1 of BCMA-32
NHIIH

SEQ ID NO: 312 - protein, 17 aa, artificial
  VH CDR2 of BCMA-32
YINPYPGYHAYNEKFQG

SEQ ID NO: 313 - protein, 12 aa, artificial
  VH CDR3 of BCMA-32
DGYYRDTDVLDY

SEQ ID NO: 314 - protein, 11 aa, artificial
  VL CDR1 of BCMA-32
QASQDISNYLN

SEQ ID NO: 315 - protein, 7 aa, artificial
  VL CDR2 of BCMA-32
YTSRLHT

SEQ ID NO: 316 - protein, 9 aa, artificial
  VL CDR3 of BCMA-32
QQGNTLPWT

SEQ ID NO: 317 - protein, 121 aa, artificial
  VH of BCMA-32
QVQLVQSGAEVKKPGASVKVSCKASGYTFTNHIIHWVRQAPGQGLEWMGYINPYPGYHAYNEKFQGRATMTSDTSTSTVYMELSSLRSEDTAVYYCARDGYYRDTDVLDYWGQGTLVTVSS

SEQ ID NO: 318 - protein, 107 aa, artificial
  VL of BCMA-32
DIQMTQSPSSLSASLGDRVTITCQASQDISNYLNWYQQKPGKAPKLLIYYTSRLHTGVPSRFSGSGSGTDFTFTISSLQQEDIATYYCQQGNTLPWTFGQGTKVEIK

SEQ ID NO: 319 - protein, 243 aa, artificial
  BCMA-32 scFv
QVQLVQSGAEVKKPGASVKVSCKASGYTFTNHIIHWVRQAPGQGLEWMGYINPYPGYHAYNEKFQGRATMTSDTSTSTVYMELSSLRSEDTAVYYCARDGYYRDTDVLDYWGQGTLVTVSSGGGGSGGGGSGGGGSDIQMTQSPSSLSASLGDRVTITCQASQDISNYLNWYQQKPGKAPKLLIYYTSRLHTGVPSRFSGSGSGTDFTFTISSLQQEDIATYYCQQGNTLPWTFGQGTKVEIK

SEQ ID NO: 320 - protein, 498 aa, artificial
  BCMA-32 HL x CD3 HL bispecific molecule
QVQLVQSGAEVKKPGASVKVSCKASGYTFTNHIIHWVRQAPGQGLEWMGYINPYPGYHAYNEKFQGRATMTSDTSTSTVYMELSSLRSEDTAVYYCARDGYYRDTDVLDYWGQGTLVTVSSGGGGSGGGGSGGGGSDIQMTQSPSSLSASLGDRVTITCQASQDISNYLNWYQQKPGKAPKLLIYYTSRLHTGVPSRFSGSGSGTDFTFTISSLQQEDIATYYCQQGNTLPWTFGQGTKVEIKSGGGGSEVQLVESGGGLVQPGGSLKLSCAASGFTFNKYAMNWVRQAPGKGLEWVARIRSKYNNYATYYADSVKDRFTISRDDSKNTAYLQMNNLKTEDTAVYYCVRHGNFGNSYISYWAYWGQGTLVTVSSGGGGSGGGGSGGGGSQTVVTQEPSLTVSPGGTVTLTCGSSTGAVTSGNYPNWVQQKPGQAPRGLIGGTKFLAPGTPARFSGSLLGGKAALTLSGVQPEDEAEYYCVLWYSNRWVFGGGTKLTVL

SEQ ID NO: 321 - protein, 5 aa, artificial
  VH CDR1 of BCMA-33
NHIIH

SEQ ID NO: 322 - protein, 17 aa, artificial
  VH CDR2 of BCMA-33
YINPYDGWGDYNEKFQG

SEQ ID NO: 323 - protein, 12 aa, artificial
  VH CDR3 of BCMA-33
DGYYRDADVLDY

SEQ ID NO: 324 - protein, 11 aa, artificial
  VL CDR1 of BCMA-33
QASQDISNYLN

SEQ ID NO: 325 - protein, 7 aa, artificial
  VL CDR2 of BCMA-33
YTSRLHT

SEQ ID NO: 326 - protein, 9 aa, artificial
  VL CDR3 of BCMA-33
QQGNTLPWT

SEQ ID NO: 327 - protein, 121 aa, artificial
  VH of BCMA-33
QVQLVQSGAEVKKPGASVKVSCKASGYTFTNHIIHWVRQAPGQGLEWMGYINPYDGWGDYNEKFQGRATMTSDTSTSTVYMELSSLRSEDTAVYYCARDGYYRDADVLDYWGQGTLVTVSS

SEQ ID NO: 328 - protein, 107 aa, artificial; identical to SEQ ID NO: 318
  VL of BCMA-33

SEQ ID NO: 329 - protein, 243 aa, artificial
  BCMA-33 scFv
QVQLVQSGAEVKKPGASVKVSCKASGYTFTNHIIHWVRQAPGQGLEWMGYINPYDGWGDYNEKFQGRATMTSDTSTSTVYMELSSLRSEDTAVYYCARDGYYRDADVLDYWGQGTLVTVSSGGGGSGGGGSGGGGSDIQMTQSPSSLSASLGDRVTITCQASQDISNYLNWYQQKPGKAPKLLIYYTSRLHTGVPSRFSGSGSGTDFTFTISSLQQEDIATYYCQQGNTLPWTFGQGTKVEIK

SEQ ID NO: 330 - protein, 498 aa, artificial
  BCMA-33 HL x CD3 HL bispecific molecule
QVQLVQSGAEVKKPGASVKVSCKASGYTFTNHIIHWVRQAPGQGLEWMGYINPYDGWGDYNEKFQGRATMTSDTSTSTVYMELSSLRSEDTAVYYCARDGYYRDADVLDYWGQGTLVTVSSGGGGSGGGGSGGGGSDIQMTQSPSSLSASLGDRVTITCQASQDISNYLNWYQQKPGKAPKLLIYYTSRLHTGVPSRFSGSGSGTDFTFTISSLQQEDIATYYCQQGNTLPWTFGQGTKVEIKSGGGGSEVQLVESGGGLVQPGGSLKLSCAASGFTFNKYAMNWVRQAPGKGLEWVARIRSKYNNYATYYADSVKDRFTISRDDSKNTAYLQMNNLKTEDTAVYYCVRHGNFGNSYISYWAYWGQGTLVTVSSGGGGSGGGGSGGGGSQTVVTQEPSLTVSPGGTVTLTCGSSTGAVTSGNYPNWVQQKPGQAPRGLIGGTKFLAPGTPARFSGSLLGGKAALTLSGVQPEDEAEYYCVLWYSNRWVFGGGTKLTVL

SEQ ID NO: 331 - protein, 5 aa, artificial
  VH CDR1 of BCMA-34
NHIIH

SEQ ID NO: 332 - protein, 17 aa, artificial
  VH CDR2 of BCMA-34
YINPYPGYHAYNEKFQG

SEQ ID NO: 333 - protein, 12 aa, artificial
  VH CDR3 of BCMA-34
DGYYRDTDVLDY

SEQ ID NO: 334 - protein, 11 aa, artificial
  VL CDR1 of BCMA-34
QASQDISNYLN

SEQ ID NO: 335 - protein, 7 aa, artificial
  VL CDR2 of BCMA-34
YTSRLHT

SEQ ID NO: 336 - protein, 9 aa, artificial
  VL CDR3 of BCMA-34
QQGNTLPWT

SEQ ID NO: 337 - protein, 121 aa, artificial; identical to SEQ ID NO: 317
  VH of BCMA-34

SEQ ID NO: 338 - protein, 107 aa, artificial
  VL of BCMA-34
DIQMTQSPSSLSASVGDRVTITCQASQDISNYLNWYQQKPGKAPKLLIYYTSRLHTGVPSRFSGSGSGTDFTFTISSLEPEDIATYYCQQGNTLPWTFGQGTKVEIK

SEQ ID NO: 339 - protein, 243 aa, artificial
  BCMA-34 scFv
QVQLVQSGAEVKKPGASVKVSCKASGYTFTNHIIHWVRQAPGQGLEWMGYINPYPGYHAYNEKFQGRATMTSDTSTSTVYMELSSLRSEDTAVYYCARDGYYRDTDVLDYWGQGTLVTVSSGGGGSGGGGSGGGGSDIQMTQSPSSLSASVGDRVTITCQASQDISNYLNWYQQKPGKAPKLLIYYTSRLHTGVPSRFSGSGSGTDFTFTISSLEPEDIATYYCQQGNTLPWTFGQGTKVEIK

SEQ ID NO: 340 - protein, 498 aa, artificial
  BCMA-34 HL x CD3 HL bispecific molecule
QVQLVQSGAEVKKPGASVKVSCKASGYTFTNHIIHWVRQAPGQGLEWMGYINPYPGYHAYNEKFQGRATMTSDTSTSTVYMELSSLRSEDTAVYYCARDGYYRDTDVLDYWGQGTLVTVSSGGGGSGGGGSGGGGSDIQMTQSPSSLSASVGDRVTITCQASQDISNYLNWYQQKPGKAPKLLIYYTSRLHTGVPSRFSGSGSGTDFTFTISSLEPEDIATYYCQQGNTLPWTFGQGTKVEIKSGGGGSEVQLVESGGGLVQPGGSLKLSCAASGFTFNKYAMNWVRQAPGKGLEWVARIRSKYNNYATYYADSVKDRFTISRDDSKNTAYLQMNNLKTEDTAVYYCVRHGNFGNSYISYWAYWGQGTLVTVSSGGGGSGGGGSGGGGSQTVVTQEPSLTVSPGGTVTLTCGSSTGAVTSGNYPNWVQQKPGQAPRGLIGGTKFLAPGTPARFSGSLLGGKAALTLSGVQPEDEAEYYCVLWYSNRWVFGGGTKLTVL

SEQ ID NO: 341 - protein, 5 aa, artificial
  VH CDR1 of BCMA-35
NHIIH

SEQ ID NO: 342 - protein, 17 aa, artificial
  VH CDR2 of BCMA-35
YINPYDGWGDYNEKFQG

SEQ ID NO: 343 - protein, 12 aa, artificial
  VH CDR3 of BCMA-35
DGYYRDADVLDY

SEQ ID NO: 344 - protein, 11 aa, artificial
  VL CDR1 of BCMA-35
QASQDISNYLN

SEQ ID NO: 345 - protein, 7 aa, artificial
  VL CDR2 of BCMA-35
YTSRLHT

SEQ ID NO: 346 - protein, 9 aa, artificial
  VL CDR3 of BCMA-35
QQGNTLPWT

SEQ ID NO: 347 - protein, 121 aa, artificial; identical to SEQ ID NO: 327
  VH of BCMA-35

SEQ ID NO: 348 - protein, 107 aa, artificial; identical to SEQ ID NO: 338
  VL of BCMA-35

SEQ ID NO: 349 - protein, 243 aa, artificial
  BCMA-35 scFv
QVQLVQSGAEVKKPGASVKVSCKASGYTFTNHIIHWVRQAPGQGLEWMGYINPYDGWGDYNEKFQGRATMTSDTSTSTVYMELSSLRSEDTAVYYCARDGYYRDADVLDYWGQGTLVTVSSGGGGSGGGGSGGGGSDIQMTQSPSSLSASVGDRVTITCQASQDISNYLNWYQQKPGKAPKLLIYYTSRLHTGVPSRFSGSGSGTDFTFTISSLEPEDIATYYCQQGNTLPWTFGQGTKVEIK

SEQ ID NO: 350 - protein, 498 aa, artificial
  BCMA-35 HL x CD3 HL bispecific molecule
QVQLVQSGAEVKKPGASVKVSCKASGYTFTNHIIHWVRQAPGQGLEWMGYINPYDGWGDYNEKFQGRATMTSDTSTSTVYMELSSLRSEDTAVYYCARDGYYRDADVLDYWGQGTLVTVSSGGGGSGGGGSGGGGSDIQMTQSPSSLSASVGDRVTITCQASQDISNYLNWYQQKPGKAPKLLIYYTSRLHTGVPSRFSGSGSGTDFTFTISSLEPEDIATYYCQQGNTLPWTFGQGTKVEIKSGGGGSEVQLVESGGGLVQPGGSLKLSCAASGFTFNKYAMNWVRQAPGKGLEWVARIRSKYNNYATYYADSVKDRFTISRDDSKNTAYLQMNNLKTEDTAVYYCVRHGNFGNSYISYWAYWGQGTLVTVSSGGGGSGGGGSGGGGSQTVVTQEPSLTVSPGGTVTLTCGSSTGAVTSGNYPNWVQQKPGQAPRGLIGGTKFLAPGTPARFSGSLLGGKAALTLSGVQPEDEAEYYCVLWYSNRWVFGGGTKLTVL

SEQ ID NO: 351 - protein, 5 aa, artificial
  VH CDR1 of BCMA-36
NHIIH

SEQ ID NO: 352 - protein, 17 aa, artificial
  VH CDR2 of BCMA-36
YINPYPGYHAYNQKFQG

SEQ ID NO: 353 - protein, 12 aa, artificial
  VH CDR3 of BCMA-36
DGYYRDTDVLDY

SEQ ID NO: 354 - protein, 11 aa, artificial
  VL CDR1 of BCMA-36
QASQDISNYLN

SEQ ID NO: 355 - protein, 7 aa, artificial
  VL CDR2 of BCMA-36
YTSRLHT

SEQ ID NO: 356 - protein, 9 aa, artificial
  VL CDR3 of BCMA-36
QQGNTLPWT

SEQ ID NO: 357 - protein, 121 aa, artificial
  VH of BCMA-36
QVQLVQSGAKVIKPGASVKVSCKASGYTFTNHIIHWVRQKPGQGLEWMGYINPYPGYHAYNQKFQGRVTMTRDKSTSTVYMELSSLTSEDTAVYYCARDGYYRDTDVLDYWGQGTLVTVSS

SEQ ID NO: 358 - protein, 107 aa, artificial
  VL of BCMA-36
DIQMTQSPSSLSASVGDRVTITCQASQDISNYLNWYQQKPGRAPKLLIYYTSRLHTGVPSRFSGSGSGTDYSFTISSLQPEDIATYYCQQGNTLPWTFGQGTKVEIK

SEQ ID NO: 359 - protein, 243 aa, artificial
  BCMA-36 scFv
QVQLVQSGAKVIKPGASVKVSCKASGYTFTNHIIHWVRQKPGQGLEWMGYINPYPGYHAYNQKFQGRVTMTRDKSTSTVYMELSSLTSEDTAVYYCARDGYYRDTDVLDYWGQGTLVTVSSGGGGSGGGGSGGGGSDIQMTQSPSSLSASVGDRVTITCQASQDISNYLNWYQQKPGRAPKLLIYYTSRLHTGVPSRFSGSGSGTDYSFTISSLQPEDIATYYCQQGNTLPWTFGQGTKVEIK

SEQ ID NO: 360 - protein, 498 aa, artificial
  BCMA-36 HL x CD3 HL bispecific molecule
QVQLVQSGAKVIKPGASVKVSCKASGYTFTNHIIHWVRQKPGQGLEWMGYINPYPGYHAYNQKFQGRVTMTRDKSTSTVYMELSSLTSEDTAVYYCARDGYYRDTDVLDYWGQGTLVTVSSGGGGSGGGGSGGGGSDIQMTQSPSSLSASVGDRVTITCQASQDISNYLNWYQQKPGRAPKLLIYYTSRLHTGVPSRFSGSGSGTDYSFTISSLQPEDIATYYCQQGNTLPWTFGQGTKVEIKSGGGGSEVQLVESGGGLVQPGGSLKLSCAASGFTFNKYAMNWVRQAPGKGLEWVARIRSKYNNYATYYADSVKDRFTISRDDSKNTAYLQMNNLKTEDTAVYYCVRHGNFGNSYISYWAYWGQGTLVTVSSGGGGSGGGGSGGGGSQTVVTQEPSLTVSPGGTVTLTCGSSTGAVTSGNYPNWVQQKPGQAPRGLIGGTKFLAPGTPARFSGSLLGGKAALTLSGVQPEDEAEYYCVLWYSNRWVFGGGTKLTVL

SEQ ID NO: 361 - protein, 5 aa, artificial
  VH CDR1 of BCMA-37
NHIIH

SEQ ID NO: 362 - protein, 17 aa, artificial
  VH CDR2 of BCMA-37
YINPYDGWGDYNQKFQG

SEQ ID NO: 363 - protein, 12 aa, artificial
  VH CDR3 of BCMA-37
DGYYRDADVLDY

SEQ ID NO: 364 - protein, 11 aa, artificial
  VL CDR1 of BCMA-37
QASQDISNYLN

SEQ ID NO: 365 - protein, 7 aa, artificial
  VL CDR2 of BCMA-37
YTSRLHT

SEQ ID NO: 366 - protein, 9 aa, artificial
  VL CDR3 of BCMA-37
QQGNTLPWT

SEQ ID NO: 367 - protein, 121 aa, artificial
  VH of BCMA-37
QVQLVQSGAKVIKPGASVKVSCKASGYTFTNHIIHWVRQKPGQGLEWMGYINPYDGWGDYNQKFQGRVTMTRDKSTSTVYMELSSLTSEDTAVYYCARDGYYRDADVLDYWGQGTLVTVSS

SEQ ID NO: 368 - protein, 107 aa, artificial; identical to SEQ ID NO: 358
  VL of BCMA-37

SEQ ID NO: 369 - protein, 243 aa, artificial
  BCMA-37 scFv
QVQLVQSGAKVIKPGASVKVSCKASGYTFTNHIIHWVRQKPGQGLEWMGYINPYDGWGDYNQKFQGRVTMTRDKSTSTVYMELSSLTSEDTAVYYCARDGYYRDADVLDYWGQGTLVTVSSGGGGSGGGGSGGGGSDIQMTQSPSSLSASVGDRVTITCQASQDISNYLNWYQQKPGRAPKLLIYYTSRLHTGVPSRFSGSGSGTDYSFTISSLQPEDIATYYCQQGNTLPWTFGQGTKVEIK

SEQ ID NO: 370 - protein, 498 aa, artificial
  BCMA-37 HL x CD3 HL bispecific molecule
QVQLVQSGAKVIKPGASVKVSCKASGYTFTNHIIHWVRQKPGQGLEWMGYINPYDGWGDYNQKFQGRVTMTRDKSTSTVYMELSSLTSEDTAVYYCARDGYYRDADVLDYWGQGTLVTVSSGGGGSGGGGSGGGGSDIQMTQSPSSLSASVGDRVTITCQASQDISNYLNWYQQKPGRAPKLLIYYTSRLHTGVPSRFSGSGSGTDYSFTISSLQPEDIATYYCQQGNTLPWTFGQGTKVEIKSGGGGSEVQLVESGGGLVQPGGSLKLSCAASGFTFNKYAMNWVRQAPGKGLEWVARIRSKYNNYATYYADSVKDRFTISRDDSKNTAYLQMNNLKTEDTAVYYCVRHGNFGNSYISYWAYWGQGTLVTVSSGGGGSGGGGSGGGGSQTVVTQEPSLTVSPGGTVTLTCGSSTGAVTSGNYPNWVQQKPGQAPRGLIGGTKFLAPGTPARFSGSLLGGKAALTLSGVQPEDEAEYYCVLWYSNRWVFGGGTKLTVL

SEQ ID NO: 371 - protein, 5 aa, artificial
  VH CDR1 of BCMA-38
NHIIH

SEQ ID NO: 372 - protein, 17 aa, artificial
  VH CDR2 of BCMA-38
YINPYPGYHAYNQKFQG

SEQ ID NO: 373 - protein, 12 aa, artificial
  VH CDR3 of BCMA-38
DGYYRDTDVLDY

SEQ ID NO: 374 - protein, 11 aa, artificial
  VL CDR1 of BCMA-38
QASQDISNYLN

SEQ ID NO: 375 - protein, 7 aa, artificial
  VL CDR2 of BCMA-38
YTSRLHT

SEQ ID NO: 376 - protein, 9 aa, artificial
  VL CDR3 of BCMA-38
QQGNTLPWT

SEQ ID NO: 377 - protein, 121 aa, artificial
  VH of BCMA-38
QVQLVQSGAEVIKPGASVKVSCKASGYTFTNHIIHWVRQKPGQGLEWIGYINPYPGYHAYNQKFQGKVTMTRDTSTSTVYMELSSLTSEDTAVYYCARDGYYRDTDVLDYWGQGTLVTVSS

SEQ ID NO: 378 - protein, 107 aa, artificial; identical to SEQ ID NO: 318
  VL of BCMA-38

SEQ ID NO: 379 - protein, 243 aa, artificial
  BCMA-38 scFv
QVQLVQSGAEVIKPGASVKVSCKASGYTFTNHIIHWVRQKPGQGLEWIGYINPYPGYHAYNQKFQGKVTMTRDTSTSTVYMELSSLTSEDTAVYYCARDGYYRDTDVLDYWGQGTLVTVSSGGGGSGGGGSGGGGSDIQMTQSPSSLSASLGDRVTITCQASQDISNYLNWYQQKPGKAPKLLIYYTSRLHTGVPSRFSGSGSGTDFTFTISSLQQEDIATYYCQQGNTLPWTFGQGTKVEIK

SEQ ID NO: 380 - protein, 498 aa, artificial
  BCMA-38 HL x CD3 HL bispecific molecule
QVQLVQSGAEVIKPGASVKVSCKASGYTFTNHIIHWVRQKPGQGLEWIGYINPYPGYHAYNQKFQGKVTMTRDTSTSTVYMELSSLTSEDTAVYYCARDGYYRDTDVLDYWGQGTLVTVSSGGGGSGGGGSGGGGSDIQMTQSPSSLSASLGDRVTITCQASQDISNYLNWYQQKPGKAPKLLIYYTSRLHTGVPSRFSGSGSGTDFTFTISSLQQEDIATYYCQQGNTLPWTFGQGTKVEIKSGGGGSEVQLVESGGGLVQPGGSLKLSCAASGFTFNKYAMNWVRQAPGKGLEWVARIRSKYNNYATYYADSVKDRFTISRDDSKNTAYLQMNNLKTEDTAVYYCVRHGNFGNSYISYWAYWGQGTLVTVSSGGGGSGGGGSGGGGSQTVVTQEPSLTVSPGGTVTLTCGSSTGAVTSGNYPNWVQQKPGQAPRGLIGGTKFLAPGTPARFSGSLLGGKAALTLSGVQPEDEAEYYCVLWYSNRWVFGGGTKLTVL

SEQ ID NO: 381 - protein, 5 aa, artificial
  VH CDR1 of BCMA-39
NHIIH

SEQ ID NO: 382 - protein, 17 aa, artificial
  VH CDR2 of BCMA-39
YINPYDGWGDYNQKFQG

SEQ ID NO: 383 - protein, 12 aa, artificial
  VH CDR3 of BCMA-39
DGYYRDADVLDY

SEQ ID NO: 384 - protein, 11 aa, artificial
  VL CDR1 of BCMA-39
QASQDISNYLN

SEQ ID NO: 385 - protein, 7 aa, artificial
  VL CDR2 of BCMA-39
YTSRLHT

SEQ ID NO: 386 - protein, 9 aa, artificial
  VL CDR3 of BCMA-39
QQGNTLPWT

SEQ ID NO: 387 - protein, 121 aa, artificial
  VH of BCMA-39
QVQLVQSGAEVIKPGASVKVSCKASGYTFTNHIIHWVRQKPGQGLEWIGYINPYDGWGDYNQKFQGKVTMTRDTSTSTVYMELSSLTSEDTAVYYCARDGYYRDADVLDYWGQGTLVTVSS

SEQ ID NO: 388 - protein, 107 aa, artificial; identical to SEQ ID NO: 318
  VL of BCMA-39

SEQ ID NO: 389 - protein, 243 aa, artificial
  BCMA-39 scFv
QVQLVQSGAEVIKPGASVKVSCKASGYTFTNHIIHWVRQKPGQGLEWIGYINPYDGWGDYNQKFQGKVTMTRDTSTSTVYMELSSLTSEDTAVYYCARDGYYRDADVLDYWGQGTLVTVSSGGGGSGGGGSGGGGSDIQMTQSPSSLSASLGDRVTITCQASQDISNYLNWYQQKPGKAPKLLIYYTSRLHTGVPSRFSGSGSGTDFTFTISSLQQEDIATYYCQQGNTLPWTFGQGTKVEIK

SEQ ID NO: 390 - protein, 498 aa, artificial
  BCMA-39 HL x CD3 HL bispecific molecule
QVQLVQSGAEVIKPGASVKVSCKASGYTFTNHIIHWVRQKPGQGLEWIGYINPYDGWGDYNQKFQGKVTMTRDTSTSTVYMELSSLTSEDTAVYYCARDGYYRDADVLDYWGQGTLVTVSSGGGGSGGGGSGGGGSDIQMTQSPSSLSASLGDRVTITCQASQDISNYLNWYQQKPGKAPKLLIYYTSRLHTGVPSRFSGSGSGTDFTFTISSLQQEDIATYYCQQGNTLPWTFGQGTKVEIKSGGGGSEVQLVESGGGLVQPGGSLKLSCAASGFTFNKYAMNWVRQAPGKGLEWVARIRSKYNNYATYYADSVKDRFTISRDDSKNTAYLQMNNLKTEDTAVYYCVRHGNFGNSYISYWAYWGQGTLVTVSSGGGGSGGGGSGGGGSQTVVTQEPSLTVSPGGTVTLTCGSSTGAVTSGNYPNWVQQKPGQAPRGLIGGTKFLAPGTPARFSGSLLGGKAALTLSGVQPEDEAEYYCVLWYSNRWVFGGGTKLTVL

SEQ ID NO: 391 - protein, 5 aa, artificial
  VH CDR1 of BCMA-40
DYYIN

SEQ ID NO: 392 - protein, 17 aa, artificial
  VH CDR2 of BCMA-40
WIYFASGNSEYNQKFTG

SEQ ID NO: 393 - protein, 10 aa, artificial
  VH CDR3 of BCMA-40
LYDYDWYFDV

SEQ ID NO: 394 - protein, 16 aa, artificial
  VL CDR1 of BCMA-40
KSSQSLVHSNGNTYLH

SEQ ID NO: 395 - protein, 7 aa, artificial
  VL CDR2 of BCMA-40
KVSNRFS

SEQ ID NO: 396 - protein, 9 aa, artificial
  VL CDR3 of BCMA-40
SQSSTAPWT

SEQ ID NO: 397 - protein, 119 aa, artificial
  VH of BCMA-40
QVQLVQSGAEVKKPGASVKVSCKASGYSFPDYYINWVRQAPGQGLEWMGWIYFASGNSEYNQKFTGRVTMTRDTSISTAYMELSSLRSEDTAVYFCASLYDYDWYFDVWGQGTMVTVSS

SEQ ID NO: 398 - protein, 112 aa, artificial
  VL of BCMA-40
DIVMTQTPLSLPVTLGQPASISCKSSQSLVHSNGNTYLHWYLQKPGQSPQLLIYKVSNRFSGVPDRFSGSGSGTDFTLKISRVEAEDVGVYYCSQSSTAPWTFGQGTKLEIK

SEQ ID NO: 399 - protein, 246 aa, artificial
  BCMA-40 scFv
QVQLVQSGAEVKKPGASVKVSCKASGYSFPDYYINWVRQAPGQGLEWMGWIYFASGNSEYNQKFTGRVTMTRDTSISTAYMELSSLRSEDTAVYFCASLYDYDWYFDVWGQGTMVTVSSGGGGSGGGGSGGGGSDIVMTQTPLSLPVTLGQPASISCKSSQSLVHSNGNTYLHWYLQKPGQSPQLLIYKVSNRFSGVPDRFSGSGSGTDFTLKISRVEAEDVGVYYCSQSSTAPWTFGQGTKLEIK

SEQ ID NO: 400 - protein, 501 aa, artificial
  BCMA-40 HL x CD3 HL bispecific molecule
QVQLVQSGAEVKKPGASVKVSCKASGYSFPDYYINWVRQAPGQGLEWMGWIYFASGNSEYNQKFTGRVTMTRDTSISTAYMELSSLRSEDTAVYFCASLYDYDWYFDVWGQGTMVTVSSGGGGSGGGGSGGGGSDIVMTQTPLSLPVTLGQPASISCKSSQSLVHSNGNTYLHWYLQKPGQSPQLLIYKVSNRFSGVPDRFSGSGSGTDFTLKISRVEAEDVGVYYCSQSSTAPWTFGQGTKLEIKSGGGGSEVQLVESGGGLVQPGGSLKLSCAASGFTFNKYAMNWVRQAPGKGLEWVARIRSKYNNYATYYADSVKDRFTISRDDSKNTAYLQMNNLKTEDTAVYYCVRHGNFGNSYISYWAYWGQGTLVTVSSGGGGSGGGGSGGGGSQTVVTQEPSLTVSPGGTVTLTCGSSTGAVTSGNYPNWVQQKPGQAPRGLIGGTKFLAPGTPARFSGSLLGGKAALTLSGVQPEDEAEYYCVLWYSNRWVFGGGTKLTVL

SEQ ID NO: 401 - protein, 5 aa, artificial
  VH CDR1 of BCMA-41
DYYIN

SEQ ID NO: 402 - protein, 17 aa, artificial
  VH CDR2 of BCMA-41
WIYFASGNSEYNQKFTG

SEQ ID NO: 403 - protein, 10 aa, artificial
  VH CDR3 of BCMA-41
LYDYDWYFDV

SEQ ID NO: 404 - protein, 16 aa, artificial
  VL CDR1 of BCMA-41
KSSQSLVHSNGNTYLH

SEQ ID NO: 405 - protein, 7 aa, artificial
  VL CDR2 of BCMA-41
KVSNRFS

SEQ ID NO: 406 - protein, 9 aa, artificial
  VL CDR3 of BCMA-41
SQSSIYPWT

SEQ ID NO: 407 - protein, 119 aa, artificial; identical to SEQ ID NO: 397
  VH of BCMA-41

SEQ ID NO: 408 - protein, 112 aa, artificial
  VL of BCMA-41
DIVMTQTPLSLPVTLGQPASISCKSSQSLVHSNGNTYLHWYLQKPGQSPQLLIYKVSNRFSGVPDRFSGSGSGTDFTLKISRVEAEDVGVYYCSQSSIYPWTFGQGTKLEIK

SEQ ID NO: 409 - protein, 246 aa, artificial
  BCMA-41 scFv
QVQLVQSGAEVKKPGASVKVSCKASGYSFPDYYINWVRQAPGQGLEWMGWIYFASGNSEYNQKFTGRVTMTRDTSISTAYMELSSLRSEDTAVYFCASLYDYDWYFDVWGQGTMVTVSSGGGGSGGGGSGGGGSDIVMTQTPLSLPVTLGQPASISCKSSQSLVHSNGNTYLHWYLQKPGQSPQLLIYKVSNRFSGVPDRFSGSGSGTDFTLKISRVEAEDVGVYYCSQSSIYPWTFGQGTKLEIK

SEQ ID NO: 410 - protein, 501 aa, artificial
  BCMA-41 HL x CD3 HL bispecific molecule
QVQLVQSGAEVKKPGASVKVSCKASGYSFPDYYINWVRQAPGQGLEWMGWIYFASGNSEYNQKFTGRVTMTRDTSISTAYMELSSLRSEDTAVYFCASLYDYDWYFDVWGQGTMVTVSSGGGGSGGGGSGGGGSDIVMTQTPLSLPVTLGQPASISCKSSQSLVHSNGNTYLHWYLQKPGQSPQLLIYKVSNRFSGVPDRFSGSGSGTDFTLKISRVEAEDVGVYYCSQSSIYPWTFGQGTKLEIKSGGGGSEVQLVESGGGLVQPGGSLKLSCAASGFTFNKYAMNWVRQAPGKGLEWVARIRSKYNNYATYYADSVKDRFTISRDDSKNTAYLQMNNLKTEDTAVYYCVRHGNFGNSYISYWAYWGQGTLVTVSSGGGGSGGGGSGGGGSQTVVTQEPSLTVSPGGTVTLTCGSSTGAVTSGNYPNWVQQKPGQAPRGLIGGTKFLAPGTPARFSGSLLGGKAALTLSGVQPEDEAEYYCVLWYSNRWVFGGGTKLTVL

SEQ ID NO: 411 - protein, 5 aa, artificial
  VH CDR1 of BCMA-42
DYYIN

SEQ ID NO: 412 - protein, 17 aa, artificial
  VH CDR2 of BCMA-42
WIYFASGNSEYNQKFTG

SEQ ID NO: 413 - protein, 10 aa, artificial
  VH CDR3 of BCMA-42
LYDYDWYFDV

SEQ ID NO: 414 - protein, 16 aa, artificial
  VL CDR1 of BCMA-42
KSSQSLVHSNGNTYLH

SEQ ID NO: 415 - protein, 7 aa, artificial
  VL CDR2 of BCMA-42
KVSNRFS

SEQ ID NO: 416 - protein, 9 aa, artificial
  VL CDR3 of BCMA-42
SQSTYPEFT

SEQ ID NO: 417 - protein, 119 aa, artificial; identical to SEQ ID NO: 397
  VH of BCMA-42

SEQ ID NO: 418 - protein, 112 aa, artificial
  VL of BCMA-42
DIVMTQTPLSLPVTLGQPASISCKSSQSLVHSNGNTYLHWYLQKPGQSPQLLIYKVSNRFSGVPDRFSGSGSGTDFTLKISRVEAEDVGVYYCSQSTYPEFTFGQGTKLEIK

SEQ ID NO: 419 - protein, 246 aa, artificial
  BCMA-42 scFv
QVQLVQSGAEVKKPGASVKVSCKASGYSFPDYYINWVRQAPGQGLEWMGWIYFASGNSEYNQKFTGRVTMTRDTSISTAYMELSSLRSEDTAVYFCASLYDYDWYFDVWGQGTMVTVSSGGGGSGGGGSGGGGSDIVMTQTPLSLPVTLGQPASISCKSSQSLVHSNGNTYLHWYLQKPGQSPQLLIYKVSNRFSGVPDRFSGSGSGTDFTLKISRVEAEDVGVYYCSQSTYPEFTFGQGTKLEIK

SEQ ID NO: 420 - protein, 501 aa, artificial
  BCMA-42 HL x CD3 HL bispecific molecule
QVQLVQSGAEVKKPGASVKVSCKASGYSFPDYYINWVRQAPGQGLEWMGWIYFASGNSEYNQKFTGRVTMTRDTSISTAYMELSSLRSEDTAVYFCASLYDYDWYFDVWGQGTMVTVSSGGGGSGGGGSGGGGSDIVMTQTPLSLPVTLGQPASISCKSSQSLVHSNGNTYLHWYLQKPGQSPQLLIYKVSNRFSGVPDRFSGSGSGTDFTLKISRVEAEDVGVYYCSQSTYPEFTFGQGTKLEIKSGGGGSEVQLVESGGGLVQPGGSLKLSCAASGFTFNKYAMNWVRQAPGKGLEWVARIRSKYNNYATYYADSVKDRFTISRDDSKNTAYLQMNNLKTEDTAVYYCVRHGNFGNSYISYWAYWGQGTLVTVSSGGGGSGGGGSGGGGSQTVVTQEPSLTVSPGGTVTLTCGSSTGAVTSGNYPNWVQQKPGQAPRGLIGGTKFLAPGTPARFSGSLLGGKAALTLSGVQPEDEAEYYCVLWYSNRWVFGGGTKLTVL

SEQ ID NO: 421 - protein, 5 aa, artificial
  VH CDR1 of BCMA-43
DYYIN

SEQ ID NO: 422 - protein, 17 aa, artificial
  VH CDR2 of BCMA-43
WIYFASGNSEYNQKFTG

SEQ ID NO: 423 - protein, 10 aa, artificial
  VH CDR3 of BCMA-43
LYDYDWYFDV

SEQ ID NO: 424 - protein, 16 aa, artificial
  VL CDR1 of BCMA-43
KSSQSLVHSNGNTYLH

SEQ ID NO: 425 - protein, 7 aa, artificial
  VL CDR2 of BCMA-43
KVSNRFS

SEQ ID NO: 426 - protein, 9 aa, artificial
  VL CDR3 of BCMA-43
SQSSTAPWT

SEQ ID NO: 427 - protein, 119 aa, artificial; identical to SEQ ID NO: 397
  VH of BCMA-43

SEQ ID NO: 428 - protein, 112 aa, artificial
  VL of BCMA-43
DIVMTQTPLSLSVTPGQPASISCKSSQSLVHSNGNTYLHWYLQKPGQSPQLLIYKVSNRFSGVPDRFSGSGSGTDFTLKISRVEAEDVGVYYCSQSSTAPWTFGQGTKLEIK

SEQ ID NO: 429 - protein, 246 aa, artificial
  BCMA-43 scFv
QVQLVQSGAEVKKPGASVKVSCKASGYSFPDYYINWVRQAPGQGLEWMGWIYFASGNSEYNQKFTGRVTMTRDTSISTAYMELSSLRSEDTAVYFCASLYDYDWYFDVWGQGTMVTVSSGGGGSGGGGSGGGGSDIVMTQTPLSLSVTPGQPASISCKSSQSLVHSNGNTYLHWYLQKPGQSPQLLIYKVSNRFSGVPDRFSGSGSGTDFTLKISRVEAEDVGVYYCSQSSTAPWTFGQGTKLEIK

SEQ ID NO: 430 - protein, 501 aa, artificial
  BCMA-43 HL x CD3 HL bispecific molecule
QVQLVQSGAEVKKPGASVKVSCKASGYSFPDYYINWVRQAPGQGLEWMGWIYFASGNSEYNQKFTGRVTMTRDTSISTAYMELSSLRSEDTAVYFCASLYDYDWYFDVWGQGTMVTVSSGGGGSGGGGSGGGGSDIVMTQTPLSLSVTPGQPASISCKSSQSLVHSNGNTYLHWYLQKPGQSPQLLIYKVSNRFSGVPDRFSGSGSGTDFTLKISRVEAEDVGVYYCSQSSTAPWTFGQGTKLEIKSGGGGSEVQLVESGGGLVQPGGSLKLSCAASGFTFNKYAMNWVRQAPGKGLEWVARIRSKYNNYATYYADSVKDRFTISRDDSKNTAYLQMNNLKTEDTAVYYCVRHGNFGNSYISYWAYWGQGTLVTVSSGGGGSGGGGSGGGGSQTVVTQEPSLTVSPGGTVTLTCGSSTGAVTSGNYPNWVQQKPGQAPRGLIGGTKFLAPGTPARFSGSLLGGKAALTLSGVQPEDEAEYYCVLWYSNRWVFGGGTKLTVL

SEQ ID NO: 431 - protein, 5 aa, artificial
  VH CDR1 of BCMA-44
DYYIN

SEQ ID NO: 432 - protein, 17 aa, artificial
  VH CDR2 of BCMA-44
WIYFASGNSEYNQKFTG

SEQ ID NO: 433 - protein, 10 aa, artificial
  VH CDR3 of BCMA-44
LYDYDWYFDV

SEQ ID NO: 434 - protein, 16 aa, artificial
  VL CDR1 of BCMA-44
KSSQSLVHSNGNTYLH

SEQ ID NO: 435 - protein, 7 aa, artificial
  VL CDR2 of BCMA-44
KVSNRFS

SEQ ID NO: 436 - protein, 9 aa, artificial
  VL CDR3 of BCMA-44
SQSSIYPWT

SEQ ID NO: 437 - protein, 119 aa, artificial; identical to SEQ ID NO: 397
  VH of BCMA-44

SEQ ID NO: 438 - protein, 112 aa, artificial
  VL of BCMA-44
DIVMTQTPLSLSVTPGQPASISCKSSQSLVHSNGNTYLHWYLQKPGQSPQLLIYKVSNRFSGVPDRFSGSGSGTDFTLKISRVEAEDVGVYYCSQSSIYPWTFGQGTKLEIK

SEQ ID NO: 439 - protein, 246 aa, artificial
  BCMA-44 scFv
QVQLVQSGAEVKKPGASVKVSCKASGYSFPDYYINWVRQAPGQGLEWMGWIYFASGNSEYNQKFTGRVTMTRDTSISTAYMELSSLRSEDTAVYFCASLYDYDWYFDVWGQGTMVTVSSGGGGSGGGGSGGGGSDIVMTQTPLSLSVTPGQPASISCKSSQSLVHSNGNTYLHWYLQKPGQSPQLLIYKVSNRFSGVPDRFSGSGSGTDFTLKISRVEAEDVGVYYCSQSSIYPWTFGQGTKLEIK

SEQ ID NO: 440 - protein, 501 aa, artificial
  BCMA-44 HL x CD3 HL bispecific molecule
QVQLVQSGAEVKKPGASVKVSCKASGYSFPDYYINWVRQAPGQGLEWMGWIYFASGNSEYNQKFTGRVTMTRDTSISTAYMELSSLRSEDTAVYFCASLYDYDWYFDVWGQGTMVTVSSGGGGSGGGGSGGGGSDIVMTQTPLSLSVTPGQPASISCKSSQSLVHSNGNTYLHWYLQKPGQSPQLLIYKVSNRFSGVPDRFSGSGSGTDFTLKISRVEAEDVGVYYCSQSSIYPWTFGQGTKLEIKSGGGGSEVQLVESGGGLVQPGGSLKLSCAASGFTFNKYAMNWVRQAPGKGLEWVARIRSKYNNYATYYADSVKDRFTISRDDSKNTAYLQMNNLKTEDTAVYYCVRHGNFGNSYISYWAYWGQGTLVTVSSGGGGSGGGGSGGGGSQTVVTQEPSLTVSPGGTVTLTCGSSTGAVTSGNYPNWVQQKPGQAPRGLIGGTKFLAPGTPARFSGSLLGGKAALTLSGVQPEDEAEYYCVLWYSNRWVFGGGTKLTVL

SEQ ID NO: 441 - protein, 5 aa, artificial
  VH CDR1 of BCMA-45
DYYIN

SEQ ID NO: 442 - protein, 17 aa, artificial
  VH CDR2 of BCMA-45
WIYFASGNSEYNQKFTG

SEQ ID NO: 443 - protein, 10 aa, artificial
  VH CDR3 of BCMA-45
LYDYDWYFDV

SEQ ID NO: 444 - protein, 16 aa, artificial
  VL CDR1 of BCMA-45
KSSQSLVHSNGNTYLH

SEQ ID NO: 445 - protein, 7 aa, artificial
  VL CDR2 of BCMA-45
KVSNRFS

SEQ ID NO: 446 - protein, 9 aa, artificial
  VL CDR3 of BCMA-45
SQSTYPEFT

SEQ ID NO: 447 - protein, 119 aa, artificial; identical to SEQ ID NO: 397
  VH of BCMA-45

SEQ ID NO: 448 - protein, 112 aa, artificial
  VL of BCMA-45
DIVMTQTPLSLSVTPGQPASISCKSSQSLVHSNGNTYLHWYLQKPGQSPQLLIYKVSNRFSGVPDRFSGSGSGTDFTLKISRVEAEDVGVYYCSQSTYPEFTFGQGTKLEIK

SEQ ID NO: 449 - protein, 246 aa, artificial
  BCMA-45 scFv
QVQLVQSGAEVKKPGASVKVSCKASGYSFPDYYINWVRQAPGQGLEWMGWIYFASGNSEYNQKFTGRVTMTRDTSISTAYMELSSLRSEDTAVYFCASLYDYDWYFDVWGQGTMVTVSSGGGGSGGGGSGGGGSDIVMTQTPLSLSVTPGQPASISCKSSQSLVHSNGNTYLHWYLQKPGQSPQLLIYKVSNRFSGVPDRFSGSGSGTDFTLKISRVEAEDVGVYYCSQSTYPEFTFGQGTKLEIK

SEQ ID NO: 450 - protein, 501 aa, artificial
  BCMA-45 HL x CD3 HL bispecific molecule
QVQLVQSGAEVKKPGASVKVSCKASGYSFPDYYINWVRQAPGQGLEWMGWIYFASGNSEYNQKFTGRVTMTRDTSISTAYMELSSLRSEDTAVYFCASLYDYDWYFDVWGQGTMVTVSSGGGGSGGGGSGGGGSDIVMTQTPLSLSVTPGQPASISCKSSQSLVHSNGNTYLHWYLQKPGQSPQLLIYKVSNRFSGVPDRFSGSGSGTDFTLKISRVEAEDVGVYYCSQSTYPEFTFGQGTKLEIKSGGGGSEVQLVESGGGLVQPGGSLKLSCAASGFTFNKYAMNWVRQAPGKGLEWVARIRSKYNNYATYYADSVKDRFTISRDDSKNTAYLQMNNLKTEDTAVYYCVRHGNFGNSYISYWAYWGQGTLVTVSSGGGGSGGGGSGGGGSQTVVTQEPSLTVSPGGTVTLTCGSSTGAVTSGNYPNWVQQKPGQAPRGLIGGTKFLAPGTPARFSGSLLGGKAALTLSGVQPEDEAEYYCVLWYSNRWVFGGGTKLTVL

SEQ ID NO: 451 - protein, 5 aa, artificial
  VH CDR1 of BCMA-46
DYYIN

SEQ ID NO: 452 - protein, 17 aa, artificial
  VH CDR2 of BCMA-46
WIYFASGNSEYNEKFTG

SEQ ID NO: 453 - protein, 10 aa, artificial
  VH CDR3 of BCMA-46
LYDYDWYFDV

SEQ ID NO: 454 - protein, 16 aa, artificial
  VL CDR1 of BCMA-46
KSSQSLVHSNGNTYLH

SEQ ID NO: 455 - protein, 7 aa, artificial
  VL CDR2 of BCMA-46
KVSNRFS

SEQ ID NO: 456 - protein, 9 aa, artificial
  VL CDR3 of BCMA-46
SQSSTAPWT

SEQ ID NO: 457 - protein, 119 aa, artificial
  VH of BCMA-46
QVQLVQSGAEVKKPGASVKVSCKASGYSFPDYYINWVRQAPGQGLEWMGWIYFASGNSEYNEKFTGRVTMTRDTSSSTAYMELSSLRSEDTAVYFCASLYDYDWYFDVWGQGTMVTVSS

SEQ ID NO: 458 - protein, 112 aa, artificial
  VL of BCMA-46
DIVMTQTPLSLSVSLGQPASISCKSSQSLVHSNGNTYLHWYLQKPGQSPQLLIYKVSNRFSGVPDRFSGSGSGTDFTLKISRVEAEDVGVYYCSQSSTAPWTFGQGTKLEIK

SEQ ID NO: 459 - protein, 246 aa, artificial
  BCMA-46 scFv
QVQLVQSGAEVKKPGASVKVSCKASGYSFPDYYINWVRQAPGQGLEWMGWIYFASGNSEYNEKFTGRVTMTRDTSSSTAYMELSSLRSEDTAVYFCASLYDYDWYFDVWGQGTMVTVSSGGGGSGGGGSGGGGSDIVMTQTPLSLSVSLGQPASISCKSSQSLVHSNGNTYLHWYLQKPGQSPQLLIYKVSNRFSGVPDRFSGSGSGTDFTLKISRVEAEDVGVYYCSQSSTAPWTFGQGTKLEIK

SEQ ID NO: 460 - protein, 501 aa, artificial
  BCMA-46 HL x CD3 HL bispecific molecule
QVQLVQSGAEVKKPGASVKVSCKASGYSFPDYYINWVRQAPGQGLEWMGWIYFASGNSEYNEKFTGRVTMTRDTSSSTAYMELSSLRSEDTAVYFCASLYDYDWYFDVWGQGTMVTVSSGGGGSGGGGSGGGGSDIVMTQTPLSLSVSLGQPASISCKSSQSLVHSNGNTYLHWYLQKPGQSPQLLIYKVSNRFSGVPDRFSGSGSGTDFTLKISRVEAEDVGVYYCSQSSTAPWTFGQGTKLEIKSGGGGSEVQLVESGGGLVQPGGSLKLSCAASGFTFNKYAMNWVRQAPGKGLEWVARIRSKYNNYATYYADSVKDRFTISRDDSKNTAYLQMNNLKTEDTAVYYCVRHGNFGNSYISYWAYWGQGTLVTVSSGGGGSGGGGSGGGGSQTVVTQEPSLTVSPGGTVTLTCGSSTGAVTSGNYPNWVQQKPGQAPRGLIGGTKFLAPGTPARFSGSLLGGKAALTLSGVQPEDEAEYYCVLWYSNRWVFGGGTKLTVL

SEQ ID NO: 461 - protein, 5 aa, artificial
  VH CDR1 of BCMA-47
DYYIN

SEQ ID NO: 462 - protein, 17 aa, artificial
  VH CDR2 of BCMA-47
WIYFASGNSEYNEKFTG

SEQ ID NO: 463 - protein, 10 aa, artificial
  VH CDR3 of BCMA-47
LYDYDWYFDV

SEQ ID NO: 464 - protein, 16 aa, artificial
  VL CDR1 of BCMA-47
KSSQSLVHSNGNTYLH

SEQ ID NO: 465 - protein, 7 aa, artificial
  VL CDR2 of BCMA-47
KVSNRFS

SEQ ID NO: 466 - protein, 9 aa, artificial
  VL CDR3 of BCMA-47
SQSSIYPWT

SEQ ID NO: 467 - protein, 119 aa, artificial; identical to SEQ ID NO: 457
  VH of BCMA-47

SEQ ID NO: 468 - protein, 112 aa, artificial
  VL of BCMA-47
DIVMTQTPLSLSVSLGQPASISCKSSQSLVHSNGNTYLHWYLQKPGQSPQLLIYKVSNRFSGVPDRFSGSGSGTDFTLKISRVEAEDVGVYYCSQSSIYPWTFGQGTKLEIK

SEQ ID NO: 469 - protein, 246 aa, artificial
  BCMA-47 scFv
QVQLVQSGAEVKKPGASVKVSCKASGYSFPDYYINWVRQAPGQGLEWMGWIYFASGNSEYNEKFTGRVTMTRDTSSSTAYMELSSLRSEDTAVYFCASLYDYDWYFDVWGQGTMVTVSSGGGGSGGGGSGGGGSDIVMTQTPLSLSVSLGQPASISCKSSQSLVHSNGNTYLHWYLQKPGQSPQLLIYKVSNRFSGVPDRFSGSGSGTDFTLKISRVEAEDVGVYYCSQSSIYPWTFGQGTKLEIK

SEQ ID NO: 470 - protein, 501 aa, artificial
  BCMA-47 HL x CD3 HL bispecific molecule
QVQLVQSGAEVKKPGASVKVSCKASGYSFPDYYINWVRQAPGQGLEWMGWIYFASGNSEYNEKFTGRVTMTRDTSSSTAYMELSSLRSEDTAVYFCASLYDYDWYFDVWGQGTMVTVSSGGGGSGGGGSGGGGSDIVMTQTPLSLSVSLGQPASISCKSSQSLVHSNGNTYLHWYLQKPGQSPQLLIYKVSNRFSGVPDRFSGSGSGTDFTLKISRVEAEDVGVYYCSQSSIYPWTFGQGTKLEIKSGGGGSEVQLVESGGGLVQPGGSLKLSCAASGFTFNKYAMNWVRQAPGKGLEWVARIRSKYNNYATYYADSVKDRFTISRDDSKNTAYLQMNNLKTEDTAVYYCVRHGNFGNSYISYWAYWGQGTLVTVSSGGGGSGGGGSGGGGSQTVVTQEPSLTVSPGGTVTLTCGSSTGAVTSGNYPNWVQQKPGQAPRGLIGGTKFLAPGTPARFSGSLLGGKAALTLSGVQPEDEAEYYCVLWYSNRWVFGGGTKLTVL

SEQ ID NO: 471 - protein, 5 aa, artificial
  VH CDR1 of BCMA-48
DYYIN

SEQ ID NO: 472 - protein, 17 aa, artificial
  VH CDR2 of BCMA-48
WIYFASGNSEYNEKFTG

SEQ ID NO: 473 - protein, 10 aa, artificial
  VH CDR3 of BCMA-48
LYDYDWYFDV

SEQ ID NO: 474 - protein, 16 aa, artificial
  VL CDR1 of BCMA-48
KSSQSLVHSNGNTYLH

SEQ ID NO: 475 - protein, 7 aa, artificial
  VL CDR2 of BCMA-48
KVSNRFS

SEQ ID NO: 476 - protein, 9 aa, artificial
  VL CDR3 of BCMA-48
SQSTYPEFT

SEQ ID NO: 477 - protein, 119 aa, artificial; identical to SEQ ID NO: 457
  VH of BCMA-48

SEQ ID NO: 478 - protein, 112 aa, artificial
  VL of BCMA-48
DIVMTQTPLSLSVSLGQPASISCKSSQSLVHSNGNTYLHWYLQKPGQSPQLLIYKVSNRFSGVPDRFSGSGSGTDFTLKISRVEAEDVGVYYCSQSTYPEFTFGQGTKLEIK

SEQ ID NO: 479 - protein, 246 aa, artificial
  BCMA-48 scFv
QVQLVQSGAEVKKPGASVKVSCKASGYSFPDYYINWVRQAPGQGLEWMGWIYFASGNSEYNEKFTGRVTMTRDTSSSTAYMELSSLRSEDTAVYFCASLYDYDWYFDVWGQGTMVTVSSGGGGSGGGGSGGGGSDIVMTQTPLSLSVSLGQPASISCKSSQSLVHSNGNTYLHWYLQKPGQSPQLLIYKVSNRFSGVPDRFSGSGSGTDFTLKISRVEAEDVGVYYCSQSTYPEFTFGQGTKLEIK

SEQ ID NO: 480 - protein, 501 aa, artificial
  BCMA-48 HL x CD3 HL bispecific molecule
QVQLVQSGAEVKKPGASVKVSCKASGYSFPDYYINWVRQAPGQGLEWMGWIYFASGNSEYNEKFTGRVTMTRDTSSSTAYMELSSLRSEDTAVYFCASLYDYDWYFDVWGQGTMVTVSSGGGGSGGGGSGGGGSDIVMTQTPLSLSVSLGQPASISCKSSQSLVHSNGNTYLHWYLQKPGQSPQLLIYKVSNRFSGVPDRFSGSGSGTDFTLKISRVEAEDVGVYYCSQSTYPEFTFGQGTKLEIKSGGGGSEVQLVESGGGLVQPGGSLKLSCAASGFTFNKYAMNWVRQAPGKGLEWVARIRSKYNNYATYYADSVKDRFTISRDDSKNTAYLQMNNLKTEDTAVYYCVRHGNFGNSYISYWAYWGQGTLVTVSSGGGGSGGGGSGGGGSQTVVTQEPSLTVSPGGTVTLTCGSSTGAVTSGNYPNWVQQKPGQAPRGLIGGTKFLAPGTPARFSGSLLGGKAALTLSGVQPEDEAEYYCVLWYSNRWVFGGGTKLTVL

SEQ ID NO: 481 - protein, 5 aa, artificial
  VH CDR1 of BCMA-49
DYYIN

SEQ ID NO: 482 - protein, 17 aa, artificial
  VH CDR2 of BCMA-49
WIYFASGNSEYNQKFTG

SEQ ID NO: 483 - protein, 10 aa, artificial
  VH CDR3 of BCMA-49
LYDYDWYFDV

SEQ ID NO: 484 - protein, 16 aa, artificial
  VL CDR1 of BCMA-49
KSSQSLVHSNGNTYLH

SEQ ID NO: 485 - protein, 7 aa, artificial
  VL CDR2 of BCMA-49
KVSNRFS

SEQ ID NO: 486 - protein, 9 aa, artificial
  VL CDR3 of BCMA-49
SQSSTAPWT

SEQ ID NO: 487 - protein, 119 aa, artificial
  VH of BCMA-49
QVQLVQSGAEVKKPGASVKVSCKASGYSFPDYYINWVRQAPGQGLEWMGWIYFASGNSEYNQKFTGRVTMTRDTSINTAYMELSSLTSEDTAVYFCASLYDYDWYFDVWGQGTMVTVSS

SEQ ID NO: 488 - protein, 112 aa, artificial
  VL of BCMA-49
DIVMTQTPLSLSVTPGQPASISCKSSQSLVHSNGNTYLHWYLQKPGQSPQLLIYKVSNRFSGVPDRFSGSGSGTDFTLKISRVEAEDVGIYYCSQSSTAPWTFGQGTKLEIK

SEQ ID NO: 489 - protein, 246 aa, artificial
  BCMA-49 scFv
QVQLVQSGAEVKKPGASVKVSCKASGYSFPDYYINWVRQAPGQGLEWMGWIYFASGNSEYNQKFTGRVTMTRDTSINTAYMELSSLTSEDTAVYFCASLYDYDWYFDVWGQGTMVTVSSGGGGSGGGGSGGGGSDIVMTQTPLSLSVTPGQPASISCKSSQSLVHSNGNTYLHWYLQKPGQSPQLLIYKVSNRFSGVPDRFSGSGSGTDFTLKISRVEAEDVGIYYCSQSSTAPWTFGQGTKLEIK

SEQ ID NO: 490 - protein, 501 aa, artificial
  BCMA-49 HL x CD3 HL bispecific molecule
QVQLVQSGAEVKKPGASVKVSCKASGYSFPDYYINWVRQAPGQGLEWMGWIYFASGNSEYNQKFTGRVTMTRDTSINTAYMELSSLTSEDTAVYFCASLYDYDWYFDVWGQGTMVTVSSGGGGSGGGGSGGGGSDIVMTQTPLSLSVTPGQPASISCKSSQSLVHSNGNTYLHWYLQKPGQSPQLLIYKVSNRFSGVPDRFSGSGSGTDFTLKISRVEAEDVGIYYCSQSSTAPWTFGQGTKLEIKSGGGGSEVQLVESGGGLVQPGGSLKLSCAASGFTFNKYAMNWVRQAPGKGLEWVARIRSKYNNYATYYADSVKDRFTISRDDSKNTAYLQMNNLKTEDTAVYYCVRHGNFGNSYISYWAYWGQGTLVTVSSGGGGSGGGGSGGGGSQTVVTQEPSLTVSPGGTVTLTCGSSTGAVTSGNYPNWVQQKPGQAPRGLIGGTKFLAPGTPARFSGSLLGGKAALTLSGVQPEDEAEYYCVLWYSNRWVFGGGTKLTVL

SEQ ID NO: 491 - protein, 5 aa, artificial
  VH CDR1 of BCMA-50
DYYIN

SEQ ID NO: 492 - protein, 17 aa, artificial
  VH CDR2 of BCMA-50
WIYFASGNSEYNQKFTG

SEQ ID NO: 493 - protein, 10 aa, artificial
  VH CDR3 of BCMA-50
LYDYDWYFDV

SEQ ID NO: 494 - protein, 16 aa, artificial
  VL CDR1 of BCMA-50
KSSQSLVHSNGNTYLH

SEQ ID NO: 495 - protein, 7 aa, artificial
  VL CDR2 of BCMA-50
KVSNRFS

SEQ ID NO: 496 - protein, 9 aa, artificial
  VL CDR3 of BCMA-50
SQSSIYPWT

SEQ ID NO: 497 - protein, 119 aa, artificial; identical to SEQ ID NO: 487
  VH of BCMA-50

SEQ ID NO: 498 - protein, 112 aa, artificial
  VL of BCMA-50
DIVMTQTPLSLSVTPGQPASISCKSSQSLVHSNGNTYLHWYLQKPGQSPQLLIYKVSNRFSGVPDRFSGSGSGTDFTLKISRVEAEDVGIYYCSQSSIYPWTFGQGTKLEIK

SEQ ID NO: 499 - protein, 246 aa, artificial
  BCMA-50 scFv
QVQLVQSGAEVKKPGASVKVSCKASGYSFPDYYINWVRQAPGQGLEWMGWIYFASGNSEYNQKFTGRVTMTRDTSINTAYMELSSLTSEDTAVYFCASLYDYDWYFDVWGQGTMVTVSSGGGGSGGGGSGGGGSDIVMTQTPLSLSVTPGQPASISCKSSQSLVHSNGNTYLHWYLQKPGQSPQLLIYKVSNRFSGVPDRFSGSGSGTDFTLKISRVEAEDVGIYYCSQSSIYPWTFGQGTKLEIK

SEQ ID NO: 500 - protein, 501 aa, artificial
  BCMA-50 HL x CD3 HL bispecific molecule
QVQLVQSGAEVKKPGASVKVSCKASGYSFPDYYINWVRQAPGQGLEWMGWIYFASGNSEYNQKFTGRVTMTRDTSINTAYMELSSLTSEDTAVYFCASLYDYDWYFDVWGQGTMVTVSSGGGGSGGGGSGGGGSDIVMTQTPLSLSVTPGQPASISCKSSQSLVHSNGNTYLHWYLQKPGQSPQLLIYKVSNRFSGVPDRFSGSGSGTDFTLKISRVEAEDVGIYYCSQSSIYPWTFGQGTKLEIKSGGGGSEVQLVESGGGLVQPGGSLKLSCAASGFTFNKYAMNWVRQAPGKGLEWVARIRSKYNNYATYYADSVKDRFTISRDDSKNTAYLQMNNLKTEDTAVYYCVRHGNFGNSYISYWAYWGQGTLVTVSSGGGGSGGGGSGGGGSQTVVTQEPSLTVSPGGTVTLTCGSSTGAVTSGNYPNWVQQKPGQAPRGLIGGTKFLAPGTPARFSGSLLGGKAALTLSGVQPEDEAEYYCVLWYSNRWVFGGGTKLTVL

SEQ ID NO: 501 - protein, 5 aa, artificial
  VH CDR1 of BCMA-51
DYYIN

SEQ ID NO: 502 - protein, 17 aa, artificial
  VH CDR2 of BCMA-51
WIYFASGNSEYNQKFTG

SEQ ID NO: 503 - protein, 10 aa, artificial
  VH CDR3 of BCMA-51
LYDYDWYFDV

SEQ ID NO: 504 - protein, 16 aa, artificial
  VL CDR1 of BCMA-51
KSSQSLVHSNGNTYLH

SEQ ID NO: 505 - protein, 7 aa, artificial
  VL CDR2 of BCMA-51
KVSNRFS

SEQ ID NO: 506 - protein, 9 aa, artificial
  VL CDR3 of BCMA-51
SQSTYPEFT

SEQ ID NO: 507 - protein, 119 aa, artificial; identical to SEQ ID NO: 487
  VH of BCMA-51

SEQ ID NO: 508 - protein, 112 aa, artificial
  VL of BCMA-51
DIVMTQTPLSLSVTPGQPASISCKSSQSLVHSNGNTYLHWYLQKPGQSPQLLIYKVSNRFSGVPDRFSGSGSGTDFTLKISRVEAEDVGIYYCSQSTYPEFTFGQGTKLEIK

SEQ ID NO: 509 - protein, 246 aa, artificial
  BCMA-51 scFv
QVQLVQSGAEVKKPGASVKVSCKASGYSFPDYYINWVRQAPGQGLEWMGWIYFASGNSEYNQKFTGRVTMTRDTSINTAYMELSSLTSEDTAVYFCASLYDYDWYFDVWGQGTMVTVSSGGGGSGGGGSGGGGSDIVMTQTPLSLSVTPGQPASISCKSSQSLVHSNGNTYLHWYLQKPGQSPQLLIYKVSNRFSGVPDRFSGSGSGTDFTLKISRVEAEDVGIYYCSQSTYPEFTFGQGTKLEIK

SEQ ID NO: 510 - protein, 501 aa, artificial
  BCMA-51 HL x CD3 HL bispecific molecule
QVQLVQSGAEVKKPGASVKVSCKASGYSFPDYYINWVRQAPGQGLEWMGWIYFASGNSEYNQKFTGRVTMTRDTSINTAYMELSSLTSEDTAVYFCASLYDYDWYFDVWGQGTMVTVSSGGGGSGGGGSGGGGSDIVMTQTPLSLSVTPGQPASISCKSSQSLVHSNGNTYLHWYLQKPGQSPQLLIYKVSNRFSGVPDRFSGSGSGTDFTLKISRVEAEDVGIYYCSQSTYPEFTFGQGTKLEIKSGGGGSEVQLVESGGGLVQPGGSLKLSCAASGFTFNKYAMNWVRQAPGKGLEWVARIRSKYNNYATYYADSVKDRFTISRDDSKNTAYLQMNNLKTEDTAVYYCVRHGNFGNSYISYWAYWGQGTLVTVSSGGGGSGGGGSGGGGSQTVVTQEPSLTVSPGGTVTLTCGSSTGAVTSGNYPNWVQQKPGQAPRGLIGGTKFLAPGTPARFSGSLLGGKAALTLSGVQPEDEAEYYCVLWYSNRWVFGGGTKLTVL

SEQ ID NO: 511 - protein, 5 aa, artificial
  VH CDR1 of BCMA-52
NAWMD

SEQ ID NO: 512 - protein, 19 aa, artificial
  VH CDR2 of BCMA-52
QITAKSNNYATYYAEPVKG

SEQ ID NO: 513 - protein, 4 aa, artificial
  VH CDR3 of BCMA-52
DGYH

SEQ ID NO: 514 - protein, 11 aa, artificial
  VL CDR1 of BCMA-52
RASEDIRNGLA

SEQ ID NO: 515 - protein, 7 aa, artificial
  VL CDR2 of BCMA-52
NANSLHT

SEQ ID NO: 516 - protein, 9 aa, artificial
  VL CDR3 of BCMA-52
EDTSKYPYT

SEQ ID NO: 517 - protein, 115 aa, artificial
  VH of BCMA-52
EVQLVESGGGLVKPGESLRLSCAASGFTFSNAWMDWVRQAPGKRLEWVAQITAKSNNYATYYAEPVKGRFTISRDDSKNTLYLQMNSLKTEDTAVYYCTDDGYHWGQGTLVTVSS

SEQ ID NO: 518 - protein, 107 aa, artificial
  VL of BCMA-52
AIQMTQSPSSLSASVGETVTIACRASEDIRNGLAWYQQKPGKAPKLLIYNANSLHTGVPSRFSGSGSGTEFTLKISSLQPEDEATYYCEDTSKYPYTFGQGTKLEIK

SEQ ID NO: 519 - protein, 237 aa, artificial
  BCMA-52 scFv
EVQLVESGGGLVKPGESLRLSCAASGFTFSNAWMDWVRQAPGKRLEWVAQITAKSNNYATYYAEPVKGRFTISRDDSKNTLYLQMNSLKTEDTAVYYCTDDGYHWGQGTLVTVSSGGGGSGGGGSGGGGSAIQMTQSPSSLSASVGETVTIACRASEDIRNGLAWYQQKPGKAPKLLIYNANSLHTGVPSRFSGSGSGTEFTLKISSLQPEDEATYYCEDTSKYPYTFGQGTKLEIK

SEQ ID NO: 520 - protein, 492 aa, artificial
  BCMA-52 HL x CD3 HL bispecific molecule
EVQLVESGGGLVKPGESLRLSCAASGFTFSNAWMDWVRQAPGKRLEWVAQITAKSNNYATYYAEPVKGRFTISRDDSKNTLYLQMNSLKTEDTAVYYCTDDGYHWGQGTLVTVSSGGGGSGGGGSGGGGSAIQMTQSPSSLSASVGETVTIACRASEDIRNGLAWYQQKPGKAPKLLIYNANSLHTGVPSRFSGSGSGTEFTLKISSLQPEDEATYYCEDTSKYPYTFGQGTKLEIKSGGGGSEVQLVESGGGLVQPGGSLKLSCAASGFTFNKYAMNWVRQAPGKGLEWVARIRSKYNNYATYYADSVKDRFTISRDDSKNTAYLQMNNLKTEDTAVYYCVRHGNFGNSYISYWAYWGQGTLVTVSSGGGGSGGGGSGGGGSQTVVTQEPSLTVSPGGTVTLTCGSSTGAVTSGNYPNWVQQKPGQAPRGLIGGTKFLAPGTPARFSGSLLGGKAALTLSGVQPEDEAEYYCVLWYSNRWVFGGGTKLTVL

SEQ ID NO: 521 - protein, 5 aa, artificial
  VH CDR1 of BCMA-53
NAWMD

SEQ ID NO: 522 - protein, 19 aa, artificial
  VH CDR2 of BCMA-53
QITAKSNNYATYYAAPVKG

SEQ ID NO: 523 - protein, 4 aa, artificial
  VH CDR3 of BCMA-53
DGYH

SEQ ID NO: 524 - protein, 11 aa, artificial
  VL CDR1 of BCMA-53
RASEDIRNGLA

SEQ ID NO: 525 - protein, 7 aa, artificial
  VL CDR2 of BCMA-53
NANSLHS

SEQ ID NO: 526 - protein, 9 aa, artificial
  VL CDR3 of BCMA-53
EDTSKYPYT

SEQ ID NO: 527 - protein, 115 aa, artificial
  VH of BCMA-53
EVQLVESGGGLVKPGESLRLSCAASGFTFSNAWMDWVRQAPGKRLEWIAQITAKSNNYATYYAAPVKGRFTISRDDSKNTLYLQMNSLKKEDTAVYYCTDDGYHWGQGTLVTVSS

SEQ ID NO: 528 - protein, 107 aa, artificial
  VL of BCMA-53
AIQMTQSPSSLSASVGDRVTIKCRASEDIRNGLAWYQQKPGKAPKLLIYNANSLHSGVPSRFSGSGSGTDFTLTISSMQPEDEGTYYCEDTSKYPYTFGQGTKLEIK

SEQ ID NO: 529 - protein, 237 aa, artificial
  BCMA-53 scFv
EVQLVESGGGLVKPGESLRLSCAASGFTFSNAWMDWVRQAPGKRLEWIAQITAKSNNYATYYAAPVKGRFTISRDDSKNTLYLQMNSLKKEDTAVYYCTDDGYHWGQGTLVTVSSGGGGSGGGGSGGGGSAIQMTQSPSSLSASVGDRVTIKCRASEDIRNGLAWYQQKPGKAPKLLIYNANSLHSGVPSRFSGSGSGTDFTLTISSMQPEDEGTYYCEDTSKYPYTFGQGTKLEIK

SEQ ID NO: 530 - protein, 492 aa, artificial
  BCMA-53 HL x CD3 HL bispecific molecule
EVQLVESGGGLVKPGESLRLSCAASGFTFSNAWMDWVRQAPGKRLEWIAQITAKSNNYATYYAAPVKGRFTISRDDSKNTLYLQMNSLKKEDTAVYYCTDDGYHWGQGTLVTVSSGGGGSGGGGSGGGGSAIQMTQSPSSLSASVGDRVTIKCRASEDIRNGLAWYQQKPGKAPKLLIYNANSLHSGVPSRFSGSGSGTDFTLTISSMQPEDEGTYYCEDTSKYPYTFGQGTKLEIKSGGGGSEVQLVESGGGLVQPGGSLKLSCAASGFTFNKYAMNWVRQAPGKGLEWVARIRSKYNNYATYYADSVKDRFTISRDDSKNTAYLQMNNLKTEDTAVYYCVRHGNFGNSYISYWAYWGQGTLVTVSSGGGGSGGGGSGGGGSQTVVTQEPSLTVSPGGTVTLTCGSSTGAVTSGNYPNWVQQKPGQAPRGLIGGTKFLAPGTPARFSGSLLGGKAALTLSGVQPEDEAEYYCVLWYSNRWVFGGGTKLTVL

SEQ ID NO: 531 - protein, 5 aa, artificial
  VH CDR1 of BCMA-54
NAWMD

SEQ ID NO: 532 - protein, 19 aa, artificial
  VH CDR2 of BCMA-54
QITAKSNNYATYYAAPVKG

SEQ ID NO: 533 - protein, 4 aa, artificial
  VH CDR3 of BCMA-54
DGYH

SEQ ID NO: 534 - protein, 11 aa, artificial
  VL CDR1 of BCMA-54
RASEDIRNGLA

SEQ ID NO: 535 - protein, 7 aa, artificial
  VL CDR2 of BCMA-54
NANSLHT

SEQ ID NO: 536 - protein, 9 aa, artificial
  VL CDR3 of BCMA-54
EDTSKYPYT

SEQ ID NO: 537 - protein, 115 aa, artificial; identical to SEQ ID NO: 527
  VH of BCMA-54

SEQ ID NO: 538 - protein, 107 aa, artificial
  VL of BCMA-54
AIQMTQSPSSLSASVGDRVTIACRASEDIRNGLAWYQQKPGKAPKLLIYNANSLHTGVPSRFSGSGSGTDFTLTISSLQPEDEAIYYCEDTSKYPYTFGQGTKLEIK

SEQ ID NO: 539 - protein, 237 aa, artificial
  BCMA-54 scFv
EVQLVESGGGLVKPGESLRLSCAASGFTFSNAWMDWVRQAPGKRLEWIAQITAKSNNYATYYAAPVKGRFTISRDDSKNTLYLQMNSLKKEDTAVYYCTDDGYHWGQGTLVTVSSGGGGSGGGGSGGGGSAIQMTQSPSSLSASVGDRVTIACRASEDIRNGLAWYQQKPGKAPKLLIYNANSLHTGVPSRFSGSGSGTDFTLTISSLQPEDEAIYYCEDTSKYPYTFGQGTKLEIK

SEQ ID NO: 540 - protein, 492 aa, artificial
  BCMA-54 HL x CD3 HL bispecific molecule
EVQLVESGGGLVKPGESLRLSCAASGFTFSNAWMDWVRQAPGKRLEWIAQITAKSNNYATYYAAPVKGRFTISRDDSKNTLYLQMNSLKKEDTAVYYCTDDGYHWGQGTLVTVSSGGGGSGGGGSGGGGSAIQMTQSPSSLSASVGDRVTIACRASEDIRNGLAWYQQKPGKAPKLLIYNANSLHTGVPSRFSGSGSGTDFTLTISSLQPEDEAIYYCEDTSKYPYTFGQGTKLEIKSGGGGSEVQLVESGGGLVQPGGSLKLSCAASGFTFNKYAMNWVRQAPGKGLEWVARIRSKYNNYATYYADSVKDRFTISRDDSKNTAYLQMNNLKTEDTAVYYCVRHGNFGNSYISYWAYWGQGTLVTVSSGGGGSGGGGSGGGGSQTVVTQEPSLTVSPGGTVTLTCGSSTGAVTSGNYPNWVQQKPGQAPRGLIGGTKFLAPGTPARFSGSLLGGKAALTLSGVQPEDEAEYYCVLWYSNRWVFGGGTKLTVL

SEQ ID NO: 541 - protein, 5 aa, artificial
  VH CDR1 of BCMA-55
NAWMD

SEQ ID NO: 542 - protein, 19 aa, artificial
  VH CDR2 of BCMA-55
QITAKSNNYATYYAAPVKG

SEQ ID NO: 543 - protein, 4 aa, artificial
  VH CDR3 of BCMA-55
DGYH

SEQ ID NO: 544 - protein, 11 aa, artificial
  VL CDR1 of BCMA-55
RASEDIRNGLA

SEQ ID NO: 545 - protein, 7 aa, artificial
  VL CDR2 of BCMA-55
NANSLHT

SEQ ID NO: 546 - protein, 9 aa, artificial
  VL CDR3 of BCMA-55
EETLKYPYT

SEQ ID NO: 547 - protein, 115 aa, artificial
  VH of BCMA-55
EVQLVESGGSLVKPGGSLRLSCAASGFTFSNAWMDWVRQAPGKRLEWVAQITAKSNNYATYYAAPVKGRFTISRDDSKNTLYLQMNSLKEEDTAVYYCTDDGYHWGQGTLVTVSS

SEQ ID NO: 548 - protein, 107 aa, artificial
  VL of BCMA-55
AIQMTQSPSSLSASVGDRVTIACRASEDIRNGLAWYQQKPGKAPKLLIYNANSLHTGVPSRFSGSGSGTDFTLTISNLQPEDEATYYCEETLKYPYTFGQGTKLEIK

SEQ ID NO: 549 - protein, 237 aa, artificial
  BCMA-55 scFv
EVQLVESGGSLVKPGGSLRLSCAASGFTFSNAWMDWVRQAPGKRLEWVAQITAKSNNYATYYAAPVKGRFTISRDDSKNTLYLQMNSLKEEDTAVYYCTDDGYHWGQGTLVTVSSGGGGSGGGGSGGGGSAIQMTQSPSSLSASVGDRVTIACRASEDIRNGLAWYQQKPGKAPKLLIYNANSLHTGVPSRFSGSGSGTDFTLTISNLQPEDEATYYCEETLKYPYTFGQGTKLEIK

SEQ ID NO: 550 - protein, 492 aa, artificial
  BCMA-55 HL x CD3 HL bispecific molecule
EVQLVESGGSLVKPGGSLRLSCAASGFTFSNAWMDWVRQAPGKRLEWVAQITAKSNNYATYYAAPVKGRFTISRDDSKNTLYLQMNSLKEEDTAVYYCTDDGYHWGQGTLVTVSSGGGGSGGGGSGGGGSAIQMTQSPSSLSASVGDRVTIACRASEDIRNGLAWYQQKPGKAPKLLIYNANSLHTGVPSRFSGSGSGTDFTLTISNLQPEDEATYYCEETLKYPYTFGQGTKLEIKSGGGGSEVQLVESGGGLVQPGGSLKLSCAASGFTFNKYAMNWVRQAPGKGLEWVARIRSKYNNYATYYADSVKDRFTISRDDSKNTAYLQMNNLKTEDTAVYYCVRHGNFGNSYISYWAYWGQGTLVTVSSGGGGSGGGGSGGGGSQTVVTQEPSLTVSPGGTVTLTCGSSTGAVTSGNYPNWVQQKPGQAPRGLIGGTKFLAPGTPARFSGSLLGGKAALTLSGVQPEDEAEYYCVLWYSNRWVFGGGTKLTVL

SEQ ID NO: 551 - protein, 5 aa, artificial
  VH CDR1 of BCMA-56
NAWMD

SEQ ID NO: 552 - protein, 19 aa, artificial
  VH CDR2 of BCMA-56
QITAKSNNYATYYAEPVKG

SEQ ID NO: 553 - protein, 4 aa, artificial
  VH CDR3 of BCMA-56
DGYH

SEQ ID NO: 554 - protein, 11 aa, artificial
  VL CDR1 of BCMA-56
RASEDIRNGLA

SEQ ID NO: 555 - protein, 7 aa, artificial
  VL CDR2 of BCMA-56
NANSLHT

SEQ ID NO: 556 - protein, 9 aa, artificial
  VL CDR3 of BCMA-56
EETLKYPYT

SEQ ID NO: 557 - protein, 115 aa, artificial; identical to SEQ ID NO: 517
  VH of BCMA-56

SEQ ID NO: 558 - protein, 107 aa, artificial
  VL of BCMA-56
AIQMTQSPSSLSASVGETVTIACRASEDIRNGLAWYQQKPGKAPKLLIYNANSLHTGVPSRFSGSGSGTEFTLKISSLQPEDEATYYCEETLKYPYTFGQGTKLEIK

SEQ ID NO: 559 - protein, 237 aa, artificial
  BCMA-56 scFv
EVQLVESGGGLVKPGESLRLSCAASGFTFSNAWMDWVRQAPGKRLEWVAQITAKSNNYATYYAEPVKGRFTISRDDSKNTLYLQMNSLKTEDTAVYYCTDDGYHWGQGTLVTVSSGGGGSGGGGSGGGGSAIQMTQSPSSLSASVGETVTIACRASEDIRNGLAWYQQKPGKAPKLLIYNANSLHTGVPSRFSGSGSGTEFTLKISSLQPEDEATYYCEETLKYPYTFGQGTKLEIK

SEQ ID NO: 560 - protein, 492 aa, artificial
  BCMA-56 HL x CD3 HL bispecific molecule
EVQLVESGGGLVKPGESLRLSCAASGFTFSNAWMDWVRQAPGKRLEWVAQITAKSNNYATYYAEPVKGRFTISRDDSKNTLYLQMNSLKTEDTAVYYCTDDGYHWGQGTLVTVSSGGGGSGGGGSGGGGSAIQMTQSPSSLSASVGETVTIACRASEDIRNGLAWYQQKPGKAPKLLIYNANSLHTGVPSRFSGSGSGTEFTLKISSLQPEDEATYYCEETLKYPYTFGQGTKLEIKSGGGGSEVQLVESGGGLVQPGGSLKLSCAASGFTFNKYAMNWVRQAPGKGLEWVARIRSKYNNYATYYADSVKDRFTISRDDSKNTAYLQMNNLKTEDTAVYYCVRHGNFGNSYISYWAYWGQGTLVTVSSGGGGSGGGGSGGGGSQTVVTQEPSLTVSPGGTVTLTCGSSTGAVTSGNYPNWVQQKPGQAPRGLIGGTKFLAPGTPARFSGSLLGGKAALTLSGVQPEDEAEYYCVLWYSNRWVFGGGTKLTVL

SEQ ID NO: 561 - protein, 5 aa, artificial
  VH CDR1 of BCMA-57
NAWMD

SEQ ID NO: 562 - protein, 19 aa, artificial
  VH CDR2 of BCMA-57
QITAKSNNYATYYAAPVKG

SEQ ID NO: 563 - protein, 4 aa, artificial
  VH CDR3 of BCMA-57
DGYH

SEQ ID NO: 564 - protein, 11 aa, artificial
  VL CDR1 of BCMA-57
RASEDIRNGLA

SEQ ID NO: 565 - protein, 7 aa, artificial
  VL CDR2 of BCMA-57
NANSLHT

SEQ ID NO: 566 - protein, 9 aa, artificial
  VL CDR3 of BCMA-57
EETLKYPYT

SEQ ID NO: 567 - protein, 115 aa, artificial; identical to SEQ ID NO: 527
  VH of BCMA-57

SEQ ID NO: 568 - protein, 107 aa, artificial
  VL of BCMA-57
AIQMTQSPSSLSASVGDRVTIACRASEDIRNGLAWYQQKPGKAPKLLIYNANSLHTGVPSRFSGSGSGTDFTLTISSLQPEDEAIYYCEETLKYPYTFGQGTKLEIK

SEQ ID NO: 569 - protein, 237 aa, artificial
  BCMA-57 scFv
EVQLVESGGGLVKPGESLRLSCAASGFTFSNAWMDWVRQAPGKRLEWIAQITAKSNNYATYYAAPVKGRFTISRDDSKNTLYLQMNSLKKEDTAVYYCTDDGYHWGQGTLVTVSSGGGGSGGGGSGGGGSAIQMTQSPSSLSASVGDRVTIACRASEDIRNGLAWYQQKPGKAPKLLIYNANSLHTGVPSRFSGSGSGTDFTLTISSLQPEDEAIYYCEETLKYPYTFGQGTKLEIK

SEQ ID NO: 570 - protein, 492 aa, artificial
  BCMA-57 HL x CD3 HL bispecific molecule
EVQLVESGGGLVKPGESLRLSCAASGFTFSNAWMDWVRQAPGKRLEWIAQITAKSNNYATYYAAPVKGRFTISRDDSKNTLYLQMNSLKKEDTAVYYCTDDGYHWGQGTLVTVSSGGGGSGGGGSGGGGSAIQMTQSPSSLSASVGDRVTIACRASEDIRNGLAWYQQKPGKAPKLLIYNANSLHTGVPSRFSGSGSGTDFTLTISSLQPEDEAIYYCEETLKYPYTFGQGTKLEIKSGGGGSEVQLVESGGGLVQPGGSLKLSCAASGFTFNKYAMNWVRQAPGKGLEWVARIRSKYNNYATYYADSVKDRFTISRDDSKNTAYLQMNNLKTEDTAVYYCVRHGNFGNSYISYWAYWGQGTLVTVSSGGGGSGGGGSGGGGSQTVVTQEPSLTVSPGGTVTLTCGSSTGAVTSGNYPNWVQQKPGQAPRGLIGGTKFLAPGTPARFSGSLLGGKAALTLSGVQPEDEAEYYCVLWYSNRWVFGGGTKLTVL

SEQ ID NO: 571 - protein, 5 aa, artificial
  VH CDR1 of BCMA-58
NAWMD

SEQ ID NO: 572 - protein, 19 aa, artificial
  VH CDR2 of BCMA-58
QITAKSNNYATYYAAPVKG

SEQ ID NO: 573 - protein, 4 aa, artificial
  VH CDR3 of BCMA-58
DGYH

SEQ ID NO: 574 - protein, 11 aa, artificial
  VL CDR1 of BCMA-58
RASEDIRNGLA

SEQ ID NO: 575 - protein, 7 aa, artificial
  VL CDR2 of BCMA-58
NANSLHS

SEQ ID NO: 576 - protein, 9 aa, artificial
  VL CDR3 of BCMA-58
EETLKYPYT

SEQ ID NO: 577 - protein, 115 aa, artificial; identical to SEQ ID NO: 527
  VH of BCMA-58

SEQ ID NO: 578 - protein, 107 aa, artificial
  VL of BCMA-58
AIQMTQSPSSLSASVGDRVTIKCRASEDIRNGLAWYQQKPGKAPKLLIYNANSLHSGVPSRFSGSGSGTDFTLTISSMQPEDEGTYYCEETLKYPYTFGQGTKLEIK

SEQ ID NO: 579 - protein, 237 aa, artificial
  BCMA-58 scFv
EVQLVESGGGLVKPGESLRLSCAASGFTFSNAWMDWVRQAPGKRLEWIAQITAKSNNYATYYAAPVKGRFTISRDDSKNTLYLQMNSLKKEDTAVYYCTDDGYHWGQGTLVTVSSGGGGSGGGGSGGGGSAIQMTQSPSSLSASVGDRVTIKCRASEDIRNGLAWYQQKPGKAPKLLIYNANSLHSGVPSRFSGSGSGTDFTLTISSMQPEDEGTYYCEETLKYPYTFGQGTKLEIK

SEQ ID NO: 580 - protein, 492 aa, artificial
  BCMA-58 HL x CD3 HL bispecific molecule
EVQLVESGGGLVKPGESLRLSCAASGFTFSNAWMDWVRQAPGKRLEWIAQITAKSNNYATYYAAPVKGRFTISRDDSKNTLYLQMNSLKKEDTAVYYCTDDGYHWGQGTLVTVSSGGGGSGGGGSGGGGSAIQMTQSPSSLSASVGDRVTIKCRASEDIRNGLAWYQQKPGKAPKLLIYNANSLHSGVPSRFSGSGSGTDFTLTISSMQPEDEGTYYCEETLKYPYTFGQGTKLEIKSGGGGSEVQLVESGGGLVQPGGSLKLSCAASGFTFNKYAMNWVRQAPGKGLEWVARIRSKYNNYATYYADSVKDRFTISRDDSKNTAYLQMNNLKTEDTAVYYCVRHGNFGNSYISYWAYWGQGTLVTVSSGGGGSGGGGSGGGGSQTVVTQEPSLTVSPGGTVTLTCGSSTGAVTSGNYPNWVQQKPGQAPRGLIGGTKFLAPGTPARFSGSLLGGKAALTLSGVQPEDEAEYYCVLWYSNRWVFGGGTKLTVL

SEQ ID NO: 581 - protein, 5 aa, artificial
  VH CDR1 of BCMA-59
NYDMA

SEQ ID NO: 582 - protein, 17 aa, artificial
  VH CDR2 of BCMA-59
SIITSGGDNYYRDSVKG

SEQ ID NO: 583 - protein, 12 aa, artificial
  VH CDR3 of BCMA-59
HDYYDGSYGFAY

SEQ ID NO: 584 - protein, 11 aa, artificial
  VL CDR1 of BCMA-59
KASQSVGINVD

SEQ ID NO: 585 - protein, 7 aa, artificial
  VL CDR2 of BCMA-59
GASNRHT

SEQ ID NO: 586 - protein, 9 aa, artificial
  VL CDR3 of BCMA-59
LQYGSIPFT

SEQ ID NO: 587 - protein, 121 aa, artificial
  VH of BCMA-59
QVQLVESGGGVVQPGRSLRLSCAASGFTFSNYDMAWVRQAPGKGLEWVASIITSGGDNYYRDSVKGRFTISRDNAKNTLYLQMNSLRAEDTAVYYCVRHDYYDGSYGFAYWGQGTLVTVSS

SEQ ID NO: 588 - protein, 107 aa, artificial; identical to SEQ ID NO: 48
  VL of BCMA-59

SEQ ID NO: 589 - protein, 243 aa, artificial
  BCMA-59 scFv
QVQLVESGGGVVQPGRSLRLSCAASGFTFSNYDMAWVRQAPGKGLEWVASIITSGGDNYYRDSVKGRFTISRDNAKNTLYLQMNSLRAEDTAVYYCVRHDYYDGSYGFAYWGQGTLVTVSSGGGGSGGGGSGGGGSEIVMTQSPASMSVSPGERATLSCKASQSVGINVDWYQQKPGQAPRLLIYGASNRHTGIPARFSGSGSGTEFTLTISSLQSEDFAVYYCLQYGSIPFTFGPGTKVDIK

SEQ ID NO: 590 - protein, 498 aa, artificial
  BCMA-59 HL x CD3 HL bispecific molecule
QVQLVESGGGVVQPGRSLRLSCAASGFTFSNYDMAWVRQAPGKGLEWVASIITSGGDNYYRDSVKGRFTISRDNAKNTLYLQMNSLRAEDTAVYYCVRHDYYDGSYGFAYWGQGTLVTVSSGGGGSGGGGSGGGGSEIVMTQSPASMSVSPGERATLSCKASQSVGINVDWYQQKPGQAPRLLIYGASNRHTGIPARFSGSGSGTEFTLTISSLQSEDFAVYYCLQYGSIPFTFGPGTKVDIKSGGGGSEVQLVESGGGLVQPGGSLKLSCAASGFTFNKYAMNWVRQAPGKGLEWVARIRSKYNNYATYYADSVKDRFTISRDDSKNTAYLQMNNLKTEDTAVYYCVRHGNFGNSYISYWAYWGQGTLVTVSSGGGGSGGGGSGGGGSQTVVTQEPSLTVSPGGTVTLTCGSSTGAVTSGNYPNWVQQKPGQAPRGLIGGTKFLAPGTPARFSGSLLGGKAALTLSGVQPEDEAEYYCVLWYSNRWVFGGGTKLTVL

SEQ ID NO: 591 - protein, 5 aa, artificial
  VH CDR1 of BCMA-60
NYDMA

SEQ ID NO: 592 - protein, 17 aa, artificial
  VH CDR2 of BCMA-60
SIITSGGDNYYRDSVKG

SEQ ID NO: 593 - protein, 12 aa, artificial
  VH CDR3 of BCMA-60
HDYYDGSYGFAY

SEQ ID NO: 594 - protein, 11 aa, artificial
  VL CDR1 of BCMA-60
KASQSVGINVD

SEQ ID NO: 595 - protein, 7 aa, artificial
  VL CDR2 of BCMA-60
GASNRHT

SEQ ID NO: 596 - protein, 9 aa, artificial
  VL CDR3 of BCMA-60
LQYGSIPFT

SEQ ID NO: 597 - protein, 121 aa, artificial
  VH of BCMA-60
QVQLVESGGGVVQPGRSLRLSCAASGFTFSNYDMAWVRQAPGKGLEWVASIITSGGDNYYRDSVKGRFTISRDNSKNTLYLQMNSLRAEDTAVYYCVRHDYYDGSYGFAYWGQGTLVTVSS

SEQ ID NO: 598 - protein, 107 aa, artificial; identical to SEQ ID NO: 8
  VL of BCMA-60

SEQ ID NO: 599 - protein, 243 aa, artificial
  BCMA-60 scFv
QVQLVESGGGVVQPGRSLRLSCAASGFTFSNYDMAWVRQAPGKGLEWVASIITSGGDNYYRDSVKGRFTISRDNSKNTLYLQMNSLRAEDTAVYYCVRHDYYDGSYGFAYWGQGTLVTVSSGGGGSGGGGSGGGGSEIVMTQSPATLSVSPGERVTLSCKASQSVGINVDWYQQKPGQAPRLLIYGASNRHTGIPARFSGSGSGREFTLTISSLQSEDFAVYYCLQYGSIPFTFGPGTKVDIK

SEQ ID NO: 600 - protein, 498 aa, artificial
  BCMA-60 HL x CD3 HL bispecific molecule
QVQLVESGGGVVQPGRSLRLSCAASGFTFSNYDMAWVRQAPGKGLEWVASIITSGGDNYYRDSVKGRFTISRDNSKNTLYLQMNSLRAEDTAVYYCVRHDYYDGSYGFAYWGQGTLVTVSSGGGGSGGGGSGGGGSEIVMTQSPATLSVSPGERVTLSCKASQSVGINVDWYQQKPGQAPRLLIYGASNRHTGIPARFSGSGSGREFTLTISSLQSEDFAVYYCLQYGSIPFTFGPGTKVDIKSGGGGSEVQLVESGGGLVQPGGSLKLSCAASGFTFNKYAMNWVRQAPGKGLEWVARIRSKYNNYATYYADSVKDRFTISRDDSKNTAYLQMNNLKTEDTAVYYCVRHGNFGNSYISYWAYWGQGTLVTVSSGGGGSGGGGSGGGGSQTVVTQEPSLTVSPGGTVTLTCGSSTGAVTSGNYPNWVQQKPGQAPRGLIGGTKFLAPGTPARFSGSLLGGKAALTLSGVQPEDEAEYYCVLWYSNRWVFGGGTKLTVL

SEQ ID NO: 601 - protein, 5 aa, artificial
  VH CDR1 of BCMA-61
NYDMA

SEQ ID NO: 602 - protein, 17 aa, artificial
  VH CDR2 of BCMA-61
SIITSGGDNYYRDSVKG

SEQ ID NO: 603 - protein, 12 aa, artificial
  VH CDR3 of BCMA-61
HDYYDGSYGFAY

SEQ ID NO: 604 - protein, 11 aa, artificial
  VL CDR1 of BCMA-61
KASQSVGINVD

SEQ ID NO: 605 - protein, 7 aa, artificial
  VL CDR2 of BCMA-61
GASNRHT

SEQ ID NO: 606 - protein, 9 aa, artificial
  VL CDR3 of BCMA-61
LQYGSIPFT

SEQ ID NO: 607 - protein, 121 aa, artificial
  VH of BCMA-61
QVQLVESGGGVVQPGRSLRLSCAASGFTFSNYDMAWVRQAPGKGLEWVASIITSGGDNYYRDSVKGRFTISRDNSKNTLYLQMNSLRSEDTAVYYCVRHDYYDGSYGFAYWGQGTLVTVSS

SEQ ID NO: 608 - protein, 107 aa, artificial; identical to SEQ ID NO: 28
  VL of BCMA-61

SEQ ID NO: 609 - protein, 243 aa, artificial
  BCMA-61 scFv
QVQLVESGGGVVQPGRSLRLSCAASGFTFSNYDMAWVRQAPGKGLEWVASIITSGGDNYYRDSVKGRFTISRDNSKNTLYLQMNSLRSEDTAVYYCVRHDYYDGSYGFAYWGQGTLVTVSSGGGGSGGGGSGGGGSEIVMTQSPATLSVSPGERVTLSCKASQSVGINVDWYQQKPGQAPRLLIYGASNRHTGIPARFSGSGSGTEFTLTISSLQSEDFAVYYCLQYGSIPFTFGPGTKVDIK

SEQ ID NO: 610 - protein, 498 aa, artificial
  BCMA-61 HL x CD3 HL bispecific molecule
QVQLVESGGGVVQPGRSLRLSCAASGFTFSNYDMAWVRQAPGKGLEWVASIITSGGDNYYRDSVKGRFTISRDNSKNTLYLQMNSLRSEDTAVYYCVRHDYYDGSYGFAYWGQGTLVTVSSGGGGSGGGGSGGGGSEIVMTQSPATLSVSPGERVTLSCKASQSVGINVDWYQQKPGQAPRLLIYGASNRHTGIPARFSGSGSGTEFTLTISSLQSEDFAVYYCLQYGSIPFTFGPGTKVDIKSGGGGSEVQLVESGGGLVQPGGSLKLSCAASGFTFNKYAMNWVRQAPGKGLEWVARIRSKYNNYATYYADSVKDRFTISRDDSKNTAYLQMNNLKTEDTAVYYCVRHGNFGNSYISYWAYWGQGTLVTVSSGGGGSGGGGSGGGGSQTVVTQEPSLTVSPGGTVTLTCGSSTGAVTSGNYPNWVQQKPGQAPRGLIGGTKFLAPGTPARFSGSLLGGKAALTLSGVQPEDEAEYYCVLWYSNRWVFGGGTKLTVL

SEQ ID NO: 611 - protein, 5 aa, artificial
  VH CDR1 of BCMA-62
NYDMA

SEQ ID NO: 612 - protein, 17 aa, artificial
  VH CDR2 of BCMA-62
SIITSGGDNYYRDSVKG

SEQ ID NO: 613 - protein, 12 aa, artificial
  VH CDR3 of BCMA-62
HDYYDGSYGFAY

SEQ ID NO: 614 - protein, 11 aa, artificial
  VL CDR1 of BCMA-62
KASQSVGINVD

SEQ ID NO: 615 - protein, 7 aa, artificial
  VL CDR2 of BCMA-62
GASNRHT

SEQ ID NO: 616 - protein, 9 aa, artificial
  VL CDR3 of BCMA-62
LQYGSIPFT

SEQ ID NO: 617 - protein, 121 aa, artificial
  VH of BCMA-62
QVQLVESGGGVVQPGRSLRLSCAASGFTFSNYDMAWVRQAPGKGLEWVASIITSGGDNYYRDSVKGRFTVSRDNSKNTLYLQMNSLRAEDTAVYYCVRHDYYDGSYGFAYWGQGTLVTVSS

SEQ ID NO: 618 - protein, 107 aa, artificial; identical to SEQ ID NO: 68
  VL of BCMA-62

SEQ ID NO: 619 - protein, 243 aa, artificial
  BCMA-62 scFv
QVQLVESGGGVVQPGRSLRLSCAASGFTFSNYDMAWVRQAPGKGLEWVASIITSGGDNYYRDSVKGRFTVSRDNSKNTLYLQMNSLRAEDTAVYYCVRHDYYDGSYGFAYWGQGTLVTVSSGGGGSGGGGSGGGGSEIVMTQSPATLSVSPGERATLSCKASQSVGINVDWYQQKPGQAPRLLIYGASNRHTGIPARFSGSGSGTEFTLTISSLQAEDFAVYYCLQYGSIPFTFGPGTKVDIK

SEQ ID NO: 620 - protein, 498 aa, artificial
  BCMA-62 HL x CD3 HL bispecific molecule
QVQLVESGGGVVQPGRSLRLSCAASGFTFSNYDMAWVRQAPGKGLEWVASIITSGGDNYYRDSVKGRFTVSRDNSKNTLYLQMNSLRAEDTAVYYCVRHDYYDGSYGFAYWGQGTLVTVSSGGGGSGGGGSGGGGSEIVMTQSPATLSVSPGERATLSCKASQSVGINVDWYQQKPGQAPRLLIYGASNRHTGIPARFSGSGSGTEFTLTISSLQAEDFAVYYCLQYGSIPFTFGPGTKVDIKSGGGGSEVQLVESGGGLVQPGGSLKLSCAASGFTFNKYAMNWVRQAPGKGLEWVARIRSKYNNYATYYADSVKDRFTISRDDSKNTAYLQMNNLKTEDTAVYYCVRHGNFGNSYISYWAYWGQGTLVTVSSGGGGSGGGGSGGGGSQTVVTQEPSLTVSPGGTVTLTCGSSTGAVTSGNYPNWVQQKPGQAPRGLIGGTKFLAPGTPARFSGSLLGGKAALTLSGVQPEDEAEYYCVLWYSNRWVFGGGTKLTVL

SEQ ID NO: 621 - protein, 5 aa, artificial
  VH CDR1 of BCMA-63
NYDMA

SEQ ID NO: 622 - protein, 17 aa, artificial
  VH CDR2 of BCMA-63
SISTRGDITSYRDSVKG

SEQ ID NO: 623 - protein, 12 aa, artificial
  VH CDR3 of BCMA-63
QDYYTDYMGFAY

SEQ ID NO: 624 - protein, 11 aa, artificial
  VL CDR1 of BCMA-63
RASEDIYNGLA

SEQ ID NO: 625 - protein, 7 aa, artificial
  VL CDR2 of BCMA-63
GASSLQD

SEQ ID NO: 626 - protein, 9 aa, artificial
  VL CDR3 of BCMA-63
QQSYKYPLT

SEQ ID NO: 627 - protein, 121 aa, artificial
  VH of BCMA-63
EVQLLESGGGLVQPGGSLRLSCAASGFTFSNYDMAWVRQAPGKGLEWVSSISTRGDITSYRDSVKGRFTISRDNAKNTLYLQMNSLRAEDTAVYYCARQDYYTDYMGFAYWGQGTLVTVSS

SEQ ID NO: 628 - protein, 107 aa, artificial
  VL of BCMA-63
AIQMTQSPSSLSASVGDTVTITCRASEDIYNGLAWYQQKPGKAPKLLIYGASSLQDGVPSRFSGSGSGTDYTLTISSLQPEDEATYYCQQSYKYPLTFGGGTKVEIK

SEQ ID NO: 629 - protein, 243 aa, artificial
  BCMA-63 scFv
EVQLLESGGGLVQPGGSLRLSCAASGFTFSNYDMAWVRQAPGKGLEWVSSISTRGDITSYRDSVKGRFTISRDNAKNTLYLQMNSLRAEDTAVYYCARQDYYTDYMGFAYWGQGTLVTVSSGGGGSGGGGSGGGGSAIQMTQSPSSLSASVGDTVTITCRASEDIYNGLAWYQQKPGKAPKLLIYGASSLQDGVPSRFSGSGSGTDYTLTISSLQPEDEATYYCQQSYKYPLTFGGGTKVEIK

SEQ ID NO: 630 - protein, 498 aa, artificial
  BCMA-63 HL x CD3 HL bispecific molecule
EVQLLESGGGLVQPGGSLRLSCAASGFTFSNYDMAWVRQAPGKGLEWVSSISTRGDITSYRDSVKGRFTISRDNAKNTLYLQMNSLRAEDTAVYYCARQDYYTDYMGFAYWGQGTLVTVSSGGGGSGGGGSGGGGSAIQMTQSPSSLSASVGDTVTITCRASEDIYNGLAWYQQKPGKAPKLLIYGASSLQDGVPSRFSGSGSGTDYTLTISSLQPEDEATYYCQQSYKYPLTFGGGTKVEIKSGGGGSEVQLVESGGGLVQPGGSLKLSCAASGFTFNKYAMNWVRQAPGKGLEWVARIRSKYNNYATYYADSVKDRFTISRDDSKNTAYLQMNNLKTEDTAVYYCVRHGNFGNSYISYWAYWGQGTLVTVSSGGGGSGGGGSGGGGSQTVVTQEPSLTVSPGGTVTLTCGSSTGAVTSGNYPNWVQQKPGQAPRGLIGGTKFLAPGTPARFSGSLLGGKAALTLSGVQPEDEAEYYCVLWYSNRWVFGGGTKLTVL

SEQ ID NO: 631 - protein, 5 aa, artificial
  VH CDR1 of BCMA-64
NYDMA

SEQ ID NO: 632 - protein, 17 aa, artificial
  VH CDR2 of BCMA-64
SISTRGDITSYRDSVKG

SEQ ID NO: 633 - protein, 12 aa, artificial
  VH CDR3 of BCMA-64
QDYYTDYMGFAY

SEQ ID NO: 634 - protein, 11 aa, artificial
  VL CDR1 of BCMA-64
RASEDIYNGLA

SEQ ID NO: 635 - protein, 7 aa, artificial
  VL CDR2 of BCMA-64
GASSLQD

SEQ ID NO: 636 - protein, 9 aa, artificial
  VL CDR3 of BCMA-64
QQSYKYPLT

SEQ ID NO: 637 - protein, 121 aa, artificial
  VH of BCMA-64
EVQLLESGGGLVQPGRSLRLSCAASGFTFSNYDMAWVRQAPGKGLEWVSSISTRGDITSYRDSVKGRFTISRDNSKNTLYLQMNSLRAEDTAVYYCARQDYYTDYMGFAYWGQGTLVTVSS

SEQ ID NO: 638 - protein, 107 aa, artificial
  VL of BCMA-64
AIQMTQSPSSLSASVGDRVTITCRASEDIYNGLAWYQQKPGKAPKLLIYGASSLQDGVPSRFSGSGSGTDFTLTISSMQPEDEATYYCQQSYKYPLTFGGGTKVEIK

SEQ ID NO: 639 - protein, 243 aa, artificial
  BCMA-64 scFv
EVQLLESGGGLVQPGRSLRLSCAASGFTFSNYDMAWVRQAPGKGLEWVSSISTRGDITSYRDSVKGRFTISRDNSKNTLYLQMNSLRAEDTAVYYCARQDYYTDYMGFAYWGQGTLVTVSSGGGGSGGGGSGGGGSAIQMTQSPSSLSASVGDRVTITCRASEDIYNGLAWYQQKPGKAPKLLIYGASSLQDGVPSRFSGSGSGTDFTLTISSMQPEDEATYYCQQSYKYPLTFGGGTKVEIK

SEQ ID NO: 640 - protein, 498 aa, artificial
  BCMA-64 HL x CD3 HL bispecific molecule
EVQLLESGGGLVQPGRSLRLSCAASGFTFSNYDMAWVRQAPGKGLEWVSSISTRGDITSYRDSVKGRFTISRDNSKNTLYLQMNSLRAEDTAVYYCARQDYYTDYMGFAYWGQGTLVTVSSGGGGSGGGGSGGGGSAIQMTQSPSSLSASVGDRVTITCRASEDIYNGLAWYQQKPGKAPKLLIYGASSLQDGVPSRFSGSGSGTDFTLTISSMQPEDEATYYCQQSYKYPLTFGGGTKVEIKSGGGGSEVQLVESGGGLVQPGGSLKLSCAASGFTFNKYAMNWVRQAPGKGLEWVARIRSKYNNYATYYADSVKDRFTISRDDSKNTAYLQMNNLKTEDTAVYYCVRHGNFGNSYISYWAYWGQGTLVTVSSGGGGSGGGGSGGGGSQTVVTQEPSLTVSPGGTVTLTCGSSTGAVTSGNYPNWVQQKPGQAPRGLIGGTKFLAPGTPARFSGSLLGGKAALTLSGVQPEDEAEYYCVLWYSNRWVFGGGTKLTVL

SEQ ID NO: 641 - protein, 5 aa, artificial
  VH CDR1 of BCMA-65
NYDMA

SEQ ID NO: 642 - protein, 17 aa, artificial
  VH CDR2 of BCMA-65
SISTRGDITSYRDSVKG

SEQ ID NO: 643 - protein, 12 aa, artificial
  VH CDR3 of BCMA-65
QDYYTDYMGFAY

SEQ ID NO: 644 - protein, 11 aa, artificial
  VL CDR1 of BCMA-65
RASEDIYNGLA

SEQ ID NO: 645 - protein, 7 aa, artificial
  VL CDR2 of BCMA-65
GASSLQD

SEQ ID NO: 646 - protein, 9 aa, artificial
  VL CDR3 of BCMA-65
QQSYKYPLT

SEQ ID NO: 647 - protein, 121 aa, artificial
  VH of BCMA-65
EVQLLESGGGLVQPGGSLRLSCAASGFTFSNYDMAWVRQAPGKGLEWVSSISTRGDITSYRDSVKGRFTISRDNSKNTLYLQMNSLRAEDTAVYYCARQDYYTDYMGFAYWGQGTLVTVSS

SEQ ID NO: 648 - protein, 107 aa, artificial
  VL of BCMA-65
AIQMTQSPSSLSASVGDRVTITCRASEDIYNGLAWYQQKPGKAPKLLIYGASSLQDGVPSRFSGSGSGTHYTLTISSLQPEDEATYYCQQSYKYPLTFGGGTKVEIK

SEQ ID NO: 649 - protein, 243 aa, artificial
  BCMA-65 scFv
EVQLLESGGGLVQPGGSLRLSCAASGFTFSNYDMAWVRQAPGKGLEWVSSISTRGDITSYRDSVKGRFTISRDNSKNTLYLQMNSLRAEDTAVYYCARQDYYTDYMGFAYWGQGTLVTVSSGGGGSGGGGSGGGGSAIQMTQSPSSLSASVGDRVTITCRASEDIYNGLAWYQQKPGKAPKLLIYGASSLQDGVPSRFSGSGSGTHYTLTISSLQPEDEATYYCQQSYKYPLTFGGGTKVEIK

SEQ ID NO: 650 - protein, 498 aa, artificial
  BCMA-65 HL x CD3 HL bispecific molecule
EVQLLESGGGLVQPGGSLRLSCAASGFTFSNYDMAWVRQAPGKGLEWVSSISTRGDITSYRDSVKGRFTISRDNSKNTLYLQMNSLRAEDTAVYYCARQDYYTDYMGFAYWGQGTLVTVSSGGGGSGGGGSGGGGSAIQMTQSPSSLSASVGDRVTITCRASEDIYNGLAWYQQKPGKAPKLLIYGASSLQDGVPSRFSGSGSGTHYTLTISSLQPEDEATYYCQQSYKYPLTFGGGTKVEIKSGGGGSEVQLVESGGGLVQPGGSLKLSCAASGFTFNKYAMNWVRQAPGKGLEWVARIRSKYNNYATYYADSVKDRFTISRDDSKNTAYLQMNNLKTEDTAVYYCVRHGNFGNSYISYWAYWGQGTLVTVSSGGGGSGGGGSGGGGSQTVVTQEPSLTVSPGGTVTLTCGSSTGAVTSGNYPNWVQQKPGQAPRGLIGGTKFLAPGTPARFSGSLLGGKAALTLSGVQPEDEAEYYCVLWYSNRWVFGGGTKLTVL

SEQ ID NO: 651 - protein, 5 aa, artificial
  VH CDR1 of BCMA-66
NYDMA

SEQ ID NO: 652 - protein, 17 aa, artificial
  VH CDR2 of BCMA-66
SISTRGDITSYRDSVKG

SEQ ID NO: 653 - protein, 12 aa, artificial
  VH CDR3 of BCMA-66
QDYYTDYMGFAY

SEQ ID NO: 654 - protein, 11 aa, artificial
  VL CDR1 of BCMA-66
RASEDIYNGLA

SEQ ID NO: 655 - protein, 7 aa, artificial
  VL CDR2 of BCMA-66
GASSLQD

SEQ ID NO: 656 - protein, 9 aa, artificial
  VL CDR3 of BCMA-66
AGPHKYPLT

SEQ ID NO: 657 - protein, 121 aa, artificial; identical to SEQ ID NO: 627
  VH of BCMA-66

SEQ ID NO: 658 - protein, 107 aa, artificial
  VL of BCMA-66
AIQMTQSPSSLSASVGDTVTITCRASEDIYNGLAWYQQKPGKAPKLLIYGASSLQDGVPSRFSGSGSGTDYTLTISSLQPEDEATYYCAGPHKYPLTFGGGTKVEIK

SEQ ID NO: 659 - protein, 243 aa, artificial
  BCMA-66 scFv
EVQLLESGGGLVQPGGSLRLSCAASGFTFSNYDMAWVRQAPGKGLEWVSSISTRGDITSYRDSVKGRFTISRDNAKNTLYLQMNSLRAEDTAVYYCARQDYYTDYMGFAYWGQGTLVTVSSGGGGSGGGGSGGGGSAIQMTQSPSSLSASVGDTVTITCRASEDIYNGLAWYQQKPGKAPKLLIYGASSLQDGVPSRFSGSGSGTDYTLTISSLQPEDEATYYCAGPHKYPLTFGGGTKVEIK

SEQ ID NO: 660 - protein, 498 aa, artificial
  BCMA-66 HL x CD3 HL bispecific molecule
EVQLLESGGGLVQPGGSLRLSCAASGFTFSNYDMAWVRQAPGKGLEWVSSISTRGDITSYRDSVKGRFTISRDNAKNTLYLQMNSLRAEDTAVYYCARQDYYTDYMGFAYWGQGTLVTVSSGGGGSGGGGSGGGGSAIQMTQSPSSLSASVGDTVTITCRASEDIYNGLAWYQQKPGKAPKLLIYGASSLQDGVPSRFSGSGSGTDYTLTISSLQPEDEATYYCAGPHKYPLTFGGGTKVEIKSGGGGSEVQLVESGGGLVQPGGSLKLSCAASGFTFNKYAMNWVRQAPGKGLEWVARIRSKYNNYATYYADSVKDRFTISRDDSKNTAYLQMNNLKTEDTAVYYCVRHGNFGNSYISYWAYWGQGTLVTVSSGGGGSGGGGSGGGGSQTVVTQEPSLTVSPGGTVTLTCGSSTGAVTSGNYPNWVQQKPGQAPRGLIGGTKFLAPGTPARFSGSLLGGKAALTLSGVQPEDEAEYYCVLWYSNRWVFGGGTKLTVL

SEQ ID NO: 661 - protein, 5 aa, artificial
  VH CDR1 of BCMA-67
NYDMA

SEQ ID NO: 662 - protein, 17 aa, artificial
  VH CDR2 of BCMA-67
SISTRGDITSYRDSVKG

SEQ ID NO: 663 - protein, 12 aa, artificial
  VH CDR3 of BCMA-67
QDYYTDYMGFAY

SEQ ID NO: 664 - protein, 11 aa, artificial
  VL CDR1 of BCMA-67
RASEDIYNGLA

SEQ ID NO: 665 - protein, 7 aa, artificial
  VL CDR2 of BCMA-67
GASSLQD

SEQ ID NO: 666 - protein, 9 aa, artificial
  VL CDR3 of BCMA-67
AGPHKYPLT

SEQ ID NO: 667 - protein, 121 aa, artificial; identical to SEQ ID NO: 647
  VH of BCMA-67

SEQ ID NO: 668 - protein, 107 aa, artificial
  VL of BCMA-67
AIQMTQSPSSLSASVGDRVTITCRASEDIYNGLAWYQQKPGKAPKLLIYGASSLQDGVPSRFSGSGSGTHYTLTISSLQPEDEATYYCAGPHKYPLTFGGGTKVEIK

SEQ ID NO: 669 - protein, 243 aa, artificial
  BCMA-67 scFv
EVQLLESGGGLVQPGGSLRLSCAASGFTFSNYDMAWVRQAPGKGLEWVSSISTRGDITSYRDSVKGRFTISRDNSKNTLYLQMNSLRAEDTAVYYCARQDYYTDYMGFAYWGQGTLVTVSSGGGGSGGGGSGGGGSAIQMTQSPSSLSASVGDRVTITCRASEDIYNGLAWYQQKPGKAPKLLIYGASSLQDGVPSRFSGSGSGTHYTLTISSLQPEDEATYYCAGPHKYPLTFGGGTKVEIK

SEQ ID NO: 670 - protein, 498 aa, artificial
  BCMA-67 HL x CD3 HL bispecific molecule
EVQLLESGGGLVQPGGSLRLSCAASGFTFSNYDMAWVRQAPGKGLEWVSSISTRGDITSYRDSVKGRFTISRDNSKNTLYLQMNSLRAEDTAVYYCARQDYYTDYMGFAYWGQGTLVTVSSGGGGSGGGGSGGGGSAIQMTQSPSSLSASVGDRVTITCRASEDIYNGLAWYQQKPGKAPKLLIYGASSLQDGVPSRFSGSGSGTHYTLTISSLQPEDEATYYCAGPHKYPLTFGGGTKVEIKSGGGGSEVQLVESGGGLVQPGGSLKLSCAASGFTFNKYAMNWVRQAPGKGLEWVARIRSKYNNYATYYADSVKDRFTISRDDSKNTAYLQMNNLKTEDTAVYYCVRHGNFGNSYISYWAYWGQGTLVTVSSGGGGSGGGGSGGGGSQTVVTQEPSLTVSPGGTVTLTCGSSTGAVTSGNYPNWVQQKPGQAPRGLIGGTKFLAPGTPARFSGSLLGGKAALTLSGVQPEDEAEYYCVLWYSNRWVFGGGTKLTVL

SEQ ID NO: 671 - protein, 5 aa, artificial
  VH CDR1 of BCMA-68
NYDMA

SEQ ID NO: 672 - protein, 17 aa, artificial
  VH CDR2 of BCMA-68
SISTRGDITSYRDSVKG

SEQ ID NO: 673 - protein, 12 aa, artificial
  VH CDR3 of BCMA-68
QDYYTDYMGFAY

SEQ ID NO: 674 - protein, 11 aa, artificial
  VL CDR1 of BCMA-68
RASEDIYNGLA

SEQ ID NO: 675 - protein, 7 aa, artificial
  VL CDR2 of BCMA-68
GASSLQD

SEQ ID NO: 676 - protein, 9 aa, artificial
  VL CDR3 of BCMA-68
QQSRNYQQT

SEQ ID NO: 677 - protein, 121 aa, artificial; identical to SEQ ID NO: 627
  VH of BCMA-68

SEQ ID NO: 678 - protein, 107 aa, artificial
  VL of BCMA-68
AIQMTQSPSSLSASVGDTVTITCRASEDIYNGLAWYQQKPGKAPKLLIYGASSLQDGVPSRFSGSGSGTDYTLTISSLQPEDEATYYCQQSRNYQQTFGGGTKVEIK

SEQ ID NO: 679 - protein, 243 aa, artificial
  BCMA-68 scFv
EVQLLESGGGLVQPGGSLRLSCAASGFTFSNYDMAWVRQAPGKGLEWVSSISTRGDITSYRDSVKGRFTISRDNAKNTLYLQMNSLRAEDTAVYYCARQDYYTDYMGFAYWGQGTLVTVSSGGGGSGGGGSGGGGSAIQMTQSPSSLSASVGDTVTITCRASEDIYNGLAWYQQKPGKAPKLLIYGASSLQDGVPSRFSGSGSGTDYTLTISSLQPEDEATYYCQQSRNYQQTFGGGTKVEIK

SEQ ID NO: 680 - protein, 498 aa, artificial
  BCMA-68 HL x CD3 HL bispecific molecule
EVQLLESGGGLVQPGGSLRLSCAASGFTFSNYDMAWVRQAPGKGLEWVSSISTRGDITSYRDSVKGRFTISRDNAKNTLYLQMNSLRAEDTAVYYCARQDYYTDYMGFAYWGQGTLVTVSSGGGGSGGGGSGGGGSAIQMTQSPSSLSASVGDTVTITCRASEDIYNGLAWYQQKPGKAPKLLIYGASSLQDGVPSRFSGSGSGTDYTLTISSLQPEDEATYYCQQSRNYQQTFGGGTKVEIKSGGGGSEVQLVESGGGLVQPGGSLKLSCAASGFTFNKYAMNWVRQAPGKGLEWVARIRSKYNNYATYYADSVKDRFTISRDDSKNTAYLQMNNLKTEDTAVYYCVRHGNFGNSYISYWAYWGQGTLVTVSSGGGGSGGGGSGGGGSQTVVTQEPSLTVSPGGTVTLTCGSSTGAVTSGNYPNWVQQKPGQAPRGLIGGTKFLAPGTPARFSGSLLGGKAALTLSGVQPEDEAEYYCVLWYSNRWVFGGGTKLTVL

SEQ ID NO: 681 - protein, 5 aa, artificial
  VH CDR1 of BCMA-69
NYDMA

SEQ ID NO: 682 - protein, 17 aa, artificial
  VH CDR2 of BCMA-69
SISTRGDITSYRDSVKG

SEQ ID NO: 683 - protein, 12 aa, artificial
  VH CDR3 of BCMA-69
QDYYTDYMGFAY

SEQ ID NO: 684 - protein, 11 aa, artificial
  VL CDR1 of BCMA-69
RASEDIYNGLA

SEQ ID NO: 685 - protein, 7 aa, artificial
  VL CDR2 of BCMA-69
GASSLQD

SEQ ID NO: 686 - protein, 9 aa, artificial
  VL CDR3 of BCMA-69
QQSRNYQQT

SEQ ID NO: 687 - protein, 121 aa, artificial; identical to SEQ ID NO: 647
  VH of BCMA-69

SEQ ID NO: 688 - protein, 107 aa, artificial
  VL of BCMA-69
AIQMTQSPSSLSASVGDRVTITCRASEDIYNGLAWYQQKPGKAPKLLIYGASSLQDGVPSRFSGSGSGTHYTLTISSLQPEDEATYYCQQSRNYQQTFGGGTKVEIK

SEQ ID NO: 689 - protein, 243 aa, artificial
  BCMA-69 scFv
EVQLLESGGGLVQPGGSLRLSCAASGFTFSNYDMAWVRQAPGKGLEWVSSISTRGDITSYRDSVKGRFTISRDNSKNTLYLQMNSLRAEDTAVYYCARQDYYTDYMGFAYWGQGTLVTVSSGGGGSGGGGSGGGGSAIQMTQSPSSLSASVGDRVTITCRASEDIYNGLAWYQQKPGKAPKLLIYGASSLQDGVPSRFSGSGSGTHYTLTISSLQPEDEATYYCQQSRNYQQTFGGGTKVEIK

SEQ ID NO: 690 - protein, 498 aa, artificial
  BCMA-69 HL x CD3 HL bispecific molecule
EVQLLESGGGLVQPGGSLRLSCAASGFTFSNYDMAWVRQAPGKGLEWVSSISTRGDITSYRDSVKGRFTISRDNSKNTLYLQMNSLRAEDTAVYYCARQDYYTDYMGFAYWGQGTLVTVSSGGGGSGGGGSGGGGSAIQMTQSPSSLSASVGDRVTITCRASEDIYNGLAWYQQKPGKAPKLLIYGASSLQDGVPSRFSGSGSGTHYTLTISSLQPEDEATYYCQQSRNYQQTFGGGTKVEIKSGGGGSEVQLVESGGGLVQPGGSLKLSCAASGFTFNKYAMNWVRQAPGKGLEWVARIRSKYNNYATYYADSVKDRFTISRDDSKNTAYLQMNNLKTEDTAVYYCVRHGNFGNSYISYWAYWGQGTLVTVSSGGGGSGGGGSGGGGSQTVVTQEPSLTVSPGGTVTLTCGSSTGAVTSGNYPNWVQQKPGQAPRGLIGGTKFLAPGTPARFSGSLLGGKAALTLSGVQPEDEAEYYCVLWYSNRWVFGGGTKLTVL

SEQ ID NO: 691 - protein, 5 aa, artificial
  VH CDR1 of BCMA-70
NYDMA

SEQ ID NO: 692 - protein, 17 aa, artificial
  VH CDR2 of BCMA-70
SISTRGDITSYRDSVKG

SEQ ID NO: 693 - protein, 12 aa, artificial
  VH CDR3 of BCMA-70
QDYYTDYMGFAY

SEQ ID NO: 694 - protein, 11 aa, artificial
  VL CDR1 of BCMA-70
RASEDIYNGLA

SEQ ID NO: 695 - protein, 7 aa, artificial
  VL CDR2 of BCMA-70
GASSLQD

SEQ ID NO: 696 - protein, 9 aa, artificial
  VL CDR3 of BCMA-70
QQSRNYQQT

SEQ ID NO: 697 - protein, 121 aa, artificial; identical to SEQ ID NO: 647
  VH of BCMA-70

SEQ ID NO: 698 - protein, 107 aa, artificial
  VL of BCMA-70
AIQMTQSPSSLSASVGDRVTITCRASEDIYNGLAWYQQKPGKAPKLLIYGASSLQDGVPSRFSGSGSGTEFTLTISSLQPEDEATYYCQQSRNYQQTFGGGTKVEIK

SEQ ID NO: 699 - protein, 243 aa, artificial
  BCMA-70 of scFv
EVQLLESGGGLVQPGGSLRLSCAASGFTFSNYDMAWVRQAPGKGLEWVSSISTRGDITSYRDSVKGRFTISRDNSKNTLYLQMNSLRAEDTAVYYCARQDYYTDYMGFAYWGQGTLVTVSSGGGGSGGGGSGGGGSAIQMTQSPSSLSASVGDRVTITCRASEDIYNGLAWYQQKPGKAPKLLIYGASSLQDGVPSRFSGSGSGTEFTLTISSLQPEDEATYYCQQSRNYQQTFGGGTKVEIK

SEQ ID NO: 700 - protein, 498 aa, artificial
  BCMA-70 HL x CD3 HL bispecific molecule
EVQLLESGGGLVQPGGSLRLSCAASGFTFSNYDMAWVRQAPGKGLEWVSSISTRGDITSYRDSVKGRFTISRDNSKNTLYLQMNSLRAEDTAVYYCARQDYYTDYMGFAYWGQGTLVTVSSGGGGSGGGGSGGGGSAIQMTQSPSSLSASVGDRVTITCRASEDIYNGLAWYQQKPGKAPKLLIYGASSLQDGVPSRFSGSGSGTEFTLTISSLQPEDEATYYCQQSRNYQQTFGGGTKVEIKSGGGGSEVQLVESGGGLVQPGGSLKLSCAASGFTFNKYAMNWVRQAPGKGLEWVARIRSKYNNYATYYADSVKDRFTISRDDSKNTAYLQMNNLKTEDTAVYYCVRHGNFGNSYISYWAYWGQGTLVTVSSGGGGSGGGGSGGGGSQTVVTQEPSLTVSPGGTVTLTCGSSTGAVTSGNYPNWVQQKPGQAPRGLIGGTKFLAPGTPARFSGSLLGGKAALTLSGVQPEDEAEYYCVLWYSNRWVFGGGTKLTVL

SEQ ID NO: 701 - protein, 5 aa, artificial
  VH CDR1 of BCMA-71
NYDMA

SEQ ID NO: 702 - protein, 17 aa, artificial
  VH CDR2 of BCMA-71
SISTRGDITSYRDSVKG

SEQ ID NO: 703 - protein, 12 aa, artificial
  VH CDR3 of BCMA-71
QDYYTDYMGFAY

SEQ ID NO: 704 - protein, 11 aa, artificial
  VL CDR1 of BCMA-71
RASEDIYNGLA

SEQ ID NO: 705 - protein, 7 aa, artificial
  VL CDR2 of BCMA-71
GASSLQD

SEQ ID NO: 706 - protein, 9 aa, artificial
  VL CDR3 of BCMA-71
AGPHKYPLT

SEQ ID NO: 707 - protein, 121 aa, artificial; identical to SEQ ID NO: 647
  VH of BCMA-71

SEQ ID NO: 708 - protein, 107 aa, artificial
  VL of BCMA-71
AIQMTQSPSSLSASVGDRVTITCRASEDIYNGLAWYQQKPGKAPKLLIYGASSLQDGVPSRFSGSGSGTEFTLTISSLQPEDEATYYCAGPHKYPLTFGGGTKVEIK

SEQ ID NO: 709 - protein, 243 aa, artificial
  BCMA-71 scFv
EVQLLESGGGLVQPGGSLRLSCAASGFTFSNYDMAWVRQAPGKGLEWVSSISTRGDITSYRDSVKGRFTISRDNSKNTLYLQMNSLRAEDTAVYYCARQDYYTDYMGFAYWGQGTLVTVSSGGGGSGGGGSGGGGSAIQMTQSPSSLSASVGDRVTITCRASEDIYNGLAWYQQKPGKAPKLLIYGASSLQDGVPSRFSGSGSGTEFTLTISSLQPEDEATYYCAGPHKYPLTFGGGTKVEIK

SEQ ID NO: 710 - protein, 498 aa, artificial
  BCMA-71 HL x CD3 HL bispecific molecule
EVQLLESGGGLVQPGGSLRLSCAASGFTFSNYDMAWVRQAPGKGLEWVSSISTRGDITSYRDSVKGRFTISRDNSKNTLYLQMNSLRAEDTAVYYCARQDYYTDYMGFAYWGQGTLVTVSSGGGGSGGGGSGGGGSAIQMTQSPSSLSASVGDRVTITCRASEDIYNGLAWYQQKPGKAPKLLIYGASSLQDGVPSRFSGSGSGTEFTLTISSLQPEDEATYYCAGPHKYPLTFGGGTKVEIKSGGGGSEVQLVESGGGLVQPGGSLKLSCAASGFTFNKYAMNWVRQAPGKGLEWVARIRSKYNNYATYYADSVKDRFTISRDDSKNTAYLQMNNLKTEDTAVYYCVRHGNFGNSYISYWAYWGQGTLVTVSSGGGGSGGGGSGGGGSQTVVTQEPSLTVSPGGTVTLTCGSSTGAVTSGNYPNWVQQKPGQAPRGLIGGTKFLAPGTPARFSGSLLGGKAALTLSGVQPEDEAEYYCVLWYSNRWVFGGGTKLTVL

SEQ ID NO: 711 - protein, 5 aa, artificial
  VH CDR1 of BCMA-72
NYDMA

SEQ ID NO: 712 - protein, 17 aa, artificial
  VH CDR2 of BCMA-72
SISTRGDITSYRDSVKG

SEQ ID NO: 713 - protein, 12 aa, artificial
  VH CDR3 of BCMA-72
QDYYTDYMGFAY

SEQ ID NO: 714 - protein, 11 aa, artificial
  VL CDR1 of BCMA-72
RASEDIYNGLA

SEQ ID NO: 715 - protein, 7 aa, artificial
  VL CDR2 of BCMA-72
GASSLQD

SEQ ID NO: 716 - protein, 9 aa, artificial
  VL CDR3 of BCMA-72
AGPHKYPLT

SEQ ID NO: 717 - protein, 121 aa, artificial; identical to SEQ ID NO: 637
  VH of BCMA-72

SEQ ID NO: 718 - protein, 107 aa, artificial
  VL of BCMA-72
AIQMTQSPSSLSASVGDRVTITCRASEDIYNGLAWYQQKPGKAPKLLIYGASSLQDGVPSRFSGSGSGTDFTLTISSMQPEDEATYYCAGPHKYPLTFGGGTKVEIK

SEQ ID NO: 719 - protein, 243 aa, artificial
  BCMA-72 scFv
EVQLLESGGGLVQPGRSLRLSCAASGFTFSNYDMAWVRQAPGKGLEWVSSISTRGDITSYRDSVKGRFTISRDNSKNTLYLQMNSLRAEDTAVYYCARQDYYTDYMGFAYWGQGTLVTVSSGGGGSGGGGSGGGGSAIQMTQSPSSLSASVGDRVTITCRASEDIYNGLAWYQQKPGKAPKLLIYGASSLQDGVPSRFSGSGSGTDFTLTISSMQPEDEATYYCAGPHKYPLTFGGGTKVEIK

SEQ ID NO: 720 - protein, 498 aa, artificial
  BCMA-72 HL x CD3 HL bispecific molecule
EVQLLESGGGLVQPGRSLRLSCAASGFTFSNYDMAWVRQAPGKGLEWVSSISTRGDITSYRDSVKGRFTISRDNSKNTLYLQMNSLRAEDTAVYYCARQDYYTDYMGFAYWGQGTLVTVSSGGGGSGGGGSGGGGSAIQMTQSPSSLSASVGDRVTITCRASEDIYNGLAWYQQKPGKAPKLLIYGASSLQDGVPSRFSGSGSGTDFTLTISSMQPEDEATYYCAGPHKYPLTFGGGTKVEIKSGGGGSEVQLVESGGGLVQPGGSLKLSCAASGFTFNKYAMNWVRQAPGKGLEWVARIRSKYNNYATYYADSVKDRFTISRDDSKNTAYLQMNNLKTEDTAVYYCVRHGNFGNSYISYWAYWGQGTLVTVSSGGGGSGGGGSGGGGSQTVVTQEPSLTVSPGGTVTLTCGSSTGAVTSGNYPNWVQQKPGQAPRGLIGGTKFLAPGTPARFSGSLLGGKAALTLSGVQPEDEAEYYCVLWYSNRWVFGGGTKLTVL

SEQ ID NO: 721 - protein, 5 aa, artificial
  VH CDR1 of BCMA-73
NYDMA

SEQ ID NO: 722 - protein, 17 aa, artificial
  VH CDR2 of BCMA-73
SISTRGDITSYRDSVKG

SEQ ID NO: 723 - protein, 12 aa, artificial
  VH CDR3 of BCMA-73
QDYYTDYMGFAY

SEQ ID NO: 724 - protein, 11 aa, artificial
  VL CDR1 of BCMA-73
RASEDIYNGLA

SEQ ID NO: 725 - protein, 7 aa, artificial
  VL CDR2 of BCMA-73
GASSLQD

SEQ ID NO: 726 - protein, 9 aa, artificial
  VL CDR3 of BCMA-73
QQSRNYQQT

SEQ ID NO: 727 - protein, 121 aa, artificial; identical to SEQ ID NO: 637
  VH of BCMA-73

SEQ ID NO: 728 - protein, 107 aa, artificial
  VL of BCMA-73
AIQMTQSPSSLSASVGDRVTITCRASEDIYNGLAWYQQKPGKAPKLLIYGASSLQDGVPSRFSGSGSGTDFTLTISSMQPEDEATYYCQQSRNYQQTFGGGTKVEIK

SEQ ID NO: 729 - protein, 243 aa, artificial
  BCMA-73 scFv
EVQLLESGGGLVQPGRSLRLSCAASGFTFSNYDMAWVRQAPGKGLEWVSSISTRGDITSYRDSVKGRFTISRDNSKNTLYLQMNSLRAEDTAVYYCARQDYYTDYMGFAYWGQGTLVTVSSGGGGSGGGGSGGGGSAIQMTQSPSSLSASVGDRVTITCRASEDIYNGLAWYQQKPGKAPKLLIYGASSLQDGVPSRFSGSGSGTDFTLTISSMQPEDEATYYCQQSRNYQQTFGGGTKVEIK

SEQ ID NO: 730 - protein, 498 aa, artificial
  BCMA-73 HL x CD3 HL bispecific molecule
EVQLLESGGGLVQPGRSLRLSCAASGFTFSNYDMAWVRQAPGKGLEWVSSISTRGDITSYRDSVKGRFTISRDNSKNTLYLQMNSLRAEDTAVYYCARQDYYTDYMGFAYWGQGTLVTVSSGGGGSGGGGSGGGGSAIQMTQSPSSLSASVGDRVTITCRASEDIYNGLAWYQQKPGKAPKLLIYGASSLQDGVPSRFSGSGSGTDFTLTISSMQPEDEATYYCQQSRNYQQTFGGGTKVEIKSGGGGSEVQLVESGGGLVQPGGSLKLSCAASGFTFNKYAMNWVRQAPGKGLEWVARIRSKYNNYATYYADSVKDRFTISRDDSKNTAYLQMNNLKTEDTAVYYCVRHGNFGNSYISYWAYWGQGTLVTVSSGGGGSGGGGSGGGGSQTVVTQEPSLTVSPGGTVTLTCGSSTGAVTSGNYPNWVQQKPGQAPRGLIGGTKFLAPGTPARFSGSLLGGKAALTLSGVQPEDEAEYYCVLWYSNRWVFGGGTKLTVL

SEQ ID NO: 731 - protein, 5 aa, artificial
  VH CDR1 of BCMA-74
NFDMA

SEQ ID NO: 732 - protein, 17 aa, artificial
  VH CDR2 of BCMA-74
SITTGGGDTYYADSVKG

SEQ ID NO: 733 - protein, 12 aa, artificial
  VH CDR3 of BCMA-74
HGYYDGYHLFDY

SEQ ID NO: 734 - protein, 11 aa, artificial
  VL CDR1 of BCMA-74
RASQGISNYLN

SEQ ID NO: 735 - protein, 7 aa, artificial
  VL CDR2 of VL CDR2
YTSNLQS

SEQ ID NO: 736 - protein, 9 aa, artificial
  VL CDR3 of BCMA-74
MGQTISSYT

SEQ ID NO: 737 - protein, 121 aa, artificial
  VH of BCMA-74
EVQLVESGGGLVQPGGSLRLSCAASGFTFSNFDMAWVRQAPGKGLVWVSSITTGGGDTYYADSVKGRFTISRDNAKNTLYLQMDSLRAEDTAVYYCVRHGYYDGYHLFDYWGQGTLVTVSS

SEQ ID NO: 738 - protein, 107 aa, artificial; identical to SEQ ID NO: 178
  VL of BCMA-74

SEQ ID NO: 739 - protein, 243 aa, artificial
  BCMA-74 scFv
EVQLVESGGGLVQPGGSLRLSCAASGFTFSNFDMAWVRQAPGKGLVWVSSITTGGGDTYYADSVKGRFTISRDNAKNTLYLQMDSLRAEDTAVYYCVRHGYYDGYHLFDYWGQGTLVTVSSGGGGSGGGGSGGGGSDIQMTQSPSSLSASVGDRVTITCRASQGISNYLNWYQQKPGKAPKPLIYYTSNLQSGVPSRFSGSGSGTDYTLTISSLQPEDFATYYCMGQTISSYTFGQGTKLEIK

SEQ ID NO: 740 - protein, 498 aa, artificial
  BCMA-74 HL x CD3 HL bispecific molecule
EVQLVESGGGLVQPGGSLRLSCAASGFTFSNFDMAWVRQAPGKGLVWVSSITTGGGDTYYADSVKGRFTISRDNAKNTLYLQMDSLRAEDTAVYYCVRHGYYDGYHLFDYWGQGTLVTVSSGGGGSGGGGSGGGGSDIQMTQSPSSLSASVGDRVTITCRASQGISNYLNWYQQKPGKAPKPLIYYTSNLQSGVPSRFSGSGSGTDYTLTISSLQPEDFATYYCMGQTISSYTFGQGTKLEIKSGGGGSEVQLVESGGGLVQPGGSLKLSCAASGFTFNKYAMNWVRQAPGKGLEWVARIRSKYNNYATYYADSVKDRFTISRDDSKNTAYLQMNNLKTEDTAVYYCVRHGNFGNSYISYWAYWGQGTLVTVSSGGGGSGGGGSGGGGSQTVVTQEPSLTVSPGGTVTLTCGSSTGAVTSGNYPNWVQQKPGQAPRGLIGGTKFLAPGTPARFSGSLLGGKAALTLSGVQPEDEAEYYCVLWYSNRWVFGGGTKLTVL

SEQ ID NO: 741 - protein, 5 aa, artificial
  VH CDR1 of BCMA-75
NFDMA

SEQ ID NO: 742 - protein, 17 aa, artificial
  VH CDR2 of BCMA-75
SITTGGGDTYYADSVKG

SEQ ID NO: 743 - protein, 12 aa, artificial
  VH CDR3 of BCMA-75
HGYYDGYHLFDY

SEQ ID NO: 744 - protein, 11 aa, artificial
  VL CDR1 of BCMA-75
RASQGISNYLN

SEQ ID NO: 745 - protein, 7 aa, artificial
  VL CDR2 of BCMA-75
YTSNLQS

SEQ ID NO: 746 - protein, 9 aa, artificial
  VL CDR3 of BCMA-75
MGQTISSYT

SEQ ID NO: 747 - protein, 121 aa, artificial
  VH of BCMA-75
EVQLVESGGGLVQPGGSLRLSCAASGFTFSNFDMAWVRQAPGKGLVWVSSITTGGGDTYYADSVKGRFTISRDNAKNTLYLQMNSLRAEDTAVYYCVRHGYYDGYHLFDYWGQGTLVTVSS

SEQ ID NO: 748 - protein, 107 aa, artificial; identical to SEQ ID NO: 178
  VL of BCMA-75

SEQ ID NO: 749 - protein, 243 aa, artificial
  BCMA-75 scFv
EVQLVESGGGLVQPGGSLRLSCAASGFTFSNFDMAWVRQAPGKGLVWVSSITTGGGDTYYADSVKGRFTISRDNAKNTLYLQMNSLRAEDTAVYYCVRHGYYDGYHLFDYWGQGTLVTVSSGGGGSGGGGSGGGGSDIQMTQSPSSLSASVGDRVTITCRASQGISNYLNWYQQKPGKAPKPLIYYTSNLQSGVPSRFSGSGSGTDYTLTISSLQPEDFATYYCMGQTISSYTFGQGTKLEIK

SEQ ID NO: 750 - protein, 498 aa, artificial
  BCMA-75 HL x CD3 HL bispecific molecule
EVQLVESGGGLVQPGGSLRLSCAASGFTFSNFDMAWVRQAPGKGLVWVSSITTGGGDTYYADSVKGRFTISRDNAKNTLYLQMNSLRAEDTAVYYCVRHGYYDGYHLFDYWGQGTLVTVSSGGGGSGGGGSGGGGSDIQMTQSPSSLSASVGDRVTITCRASQGISNYLNWYQQKPGKAPKPLIYYTSNLQSGVPSRFSGSGSGTDYTLTISSLQPEDFATYYCMGQTISSYTFGQGTKLEIKSGGGGSEVQLVESGGGLVQPGGSLKLSCAASGFTFNKYAMNWVRQAPGKGLEWVARIRSKYNNYATYYADSVKDRFTISRDDSKNTAYLQMNNLKTEDTAVYYCVRHGNFGNSYISYWAYWGQGTLVTVSSGGGGSGGGGSGGGGSQTVVTQEPSLTVSPGGTVTLTCGSSTGAVTSGNYPNWVQQKPGQAPRGLIGGTKFLAPGTPARFSGSLLGGKAALTLSGVQPEDEAEYYCVLWYSNRWVFGGGTKLTVL

SEQ ID NO: 751 - protein, 5 aa, artificial
  VH CDR1 of BCMA-76
NFDMA

SEQ ID NO: 752 - protein, 17 aa, artificial
  VH CDR2 of BCMA-76
SITTGGGDTYYADSVKG

SEQ ID NO: 753 - protein, 12 aa, artificial
  VH CDR3 of BCMA-76
HGYYDGYHLFDY

SEQ ID NO: 754 - protein, 11 aa, artificial
  VL CDR1 of BCMA-76
RASQGISNYLN

SEQ ID NO: 755 - protein, 7 aa, artificial
  VL CDR2 of BCMA-76
YTSNLQS

SEQ ID NO: 756 - protein, 9 aa, artificial
  VL CDR3 of BCMA-76
MGQTISSYT

SEQ ID NO: 757 - protein, 121 aa, artificial
  VH of BCMA-76
EVQLVESGGGLVQPGGSLRLSCAASGFTFSNFDMAWVRQAPGKGLVWVSSITTGGGDTYYADSVKGRFTISRDNAKNTLYLQMDSLRSEDTAVYYCVRHGYYDGYHLFDYWGQGTLVTVSS

SEQ ID NO: 758 - protein, 107 aa, artificial; identical to SEQ ID NO: 218
  VL of BCMA-76

SEQ ID NO: 759 - protein, 243 aa, artificial
  BCMA-76 scFv
EVQLVESGGGLVQPGGSLRLSCAASGFTFSNFDMAWVRQAPGKGLVWVSSITTGGGDTYYADSVKGRFTISRDNAKNTLYLQMDSLRSEDTAVYYCVRHGYYDGYHLFDYWGQGTLVTVSSGGGGSGGGGSGGGGSDIQMTQSPSSLSASVGDRVTISCRASQGISNYLNWYQQKPGKAPKPLIYYTSNLQSGVPSRFSGSGSGTDYTLTISSLQPEDFATYYCMGQTISSYTFGQGTKLEIK

SEQ ID NO: 760 - protein, 498 aa, artificial
  BCMA-76 HL x CD3 HL bispecific molecule
EVQLVESGGGLVQPGGSLRLSCAASGFTFSNFDMAWVRQAPGKGLVWVSSITTGGGDTYYADSVKGRFTISRDNAKNTLYLQMDSLRSEDTAVYYCVRHGYYDGYHLFDYWGQGTLVTVSSGGGGSGGGGSGGGGSDIQMTQSPSSLSASVGDRVTISCRASQGISNYLNWYQQKPGKAPKPLIYYTSNLQSGVPSRFSGSGSGTDYTLTISSLQPEDFATYYCMGQTISSYTFGQGTKLEIKSGGGGSEVQLVESGGGLVQPGGSLKLSCAASGFTFNKYAMNWVRQAPGKGLEWVARIRSKYNNYATYYADSVKDRFTISRDDSKNTAYLQMNNLKTEDTAVYYCVRHGNFGNSYISYWAYWGQGTLVTVSSGGGGSGGGGSGGGGSQTVVTQEPSLTVSPGGTVTLTCGSSTGAVTSGNYPNWVQQKPGQAPRGLIGGTKFLAPGTPARFSGSLLGGKAALTLSGVQPEDEAEYYCVLWYSNRWVFGGGTKLTVL

SEQ ID NO: 761 - protein, 5 aa, artificial
  VH CDR1 of BCMA-77
NFDMA

SEQ ID NO: 762 - protein, 17 aa, artificial
  VH CDR2 of VH CDR2
SITTGGGDTYYADSVKG

SEQ ID NO: 763 - protein, 12 aa, artificial
  VH CDR3 of BCMA-77
HGYYDGYHLFDY

SEQ ID NO: 764 - protein, 11 aa, artificial
  VL CDR1 of BCMA-77
RASQGISNYLN

SEQ ID NO: 765 - protein, 7 aa, artificial
  VL CDR2 of BCMA-77
YTSNLQS

SEQ ID NO: 766 - protein, 9 aa, artificial
  VL CDR3 of BCMA-77
MGQTISSYT

SEQ ID NO: 767 - protein, 121 aa, artificial
  VH of BCMA-77
EVQLVESGGGLVQPGRSLRLSCAASGFTFSNFDMAWVRQAPAKGLEWVSSITTGGGDTYYADSVKGRFTISRDNAKNTLYLQMNSLRAEDTAVYYCVRHGYYDGYHLFDYWGQGTLVTVSS

SEQ ID NO: 768 - protein, 107 aa, artificial; identical to SEQ ID NO: 228
  VL of BCMA-77

SEQ ID NO: 769 - protein, 243 aa, artificial
  BCMA-77 scFv
EVQLVESGGGLVQPGRSLRLSCAASGFTFSNFDMAWVRQAPAKGLEWVSSITTGGGDTYYADSVKGRFTISRDNAKNTLYLQMNSLRAEDTAVYYCVRHGYYDGYHLFDYWGQGTLVTVSSGGGGSGGGGSGGGGSDIQMTQSPSSLSASVGDRVTITCRASQGISNYLNWYQQKPGKAPKPLIYYTSNLQSGVPSRFSGSGSGTDFTLTISSLQPEDFATYYCMGQTISSYTFGQGTKLEIK

SEQ ID NO: 770 - protein, 498 aa, artificial
  BCMA-77 HL x CD3 HL bispecific molecule
EVQLVESGGGLVQPGRSLRLSCAASGFTFSNFDMAWVRQAPAKGLEWVSSITTGGGDTYYADSVKGRFTISRDNAKNTLYLQMNSLRAEDTAVYYCVRHGYYDGYHLFDYWGQGTLVTVSSGGGGSGGGGSGGGGSDIQMTQSPSSLSASVGDRVTITCRASQGISNYLNWYQQKPGKAPKPLIYYTSNLQSGVPSRFSGSGSGTDFTLTISSLQPEDFATYYCMGQTISSYTFGQGTKLEIKSGGGGSEVQLVESGGGLVQPGGSLKLSCAASGFTFNKYAMNWVRQAPGKGLEWVARIRSKYNNYATYYADSVKDRFTISRDDSKNTAYLQMNNLKTEDTAVYYCVRHGNFGNSYISYWAYWGQGTLVTVSSGGGGSGGGGSGGGGSQTVVTQEPSLTVSPGGTVTLTCGSSTGAVTSGNYPNWVQQKPGQAPRGLIGGTKFLAPGTPARFSGSLLGGKAALTLSGVQPEDEAEYYCVLWYSNRWVFGGGTKLTVL

SEQ ID NO: 771 - protein, 5 aa, artificial
  VH CDR1 of BCMA-78
NFDMA

SEQ ID NO: 772 - protein, 17 aa, artificial
  VH CDR2 of BCMA-78
SITTGGGDTYYADSVKG

SEQ ID NO: 773 - protein, 12 aa, artificial
  VH CDR3 of BCMA-78
HGYYDGYHLFDY

SEQ ID NO: 774 - protein, 11 aa, artificial
  VL CDR1 of BCMA-78
RASQGISNHLN

SEQ ID NO: 775 - protein, 7 aa, artificial
  VL CDR2 of BCMA-78
YTSNLQS

SEQ ID NO: 776 - protein, 9 aa, artificial
  VL CDR3 of BCMA-78
QQYFDRPYT

SEQ ID NO: 777 - protein, 121 aa, artificial; identical to SEQ ID NO: 747
  VH of BCMA-78

SEQ ID NO: 778 - protein, 107 aa, artificial
  VL of BCMA-78
DIQMTQSPSSLSASVGDRVTISCRASQGISNHLNWFQQKPGRAPKPLIYYTSNLQSGVPSRFSGSGSGTDFTLTISSLQPEDFATYYCQQYFDRPYTFGGGTKVEIK

SEQ ID NO: 779 - protein, 243 aa, artificial
  BCMA-78 scFv
EVQLVESGGGLVQPGGSLRLSCAASGFTFSNFDMAWVRQAPGKGLVWVSSITTGGGDTYYADSVKGRFTISRDNAKNTLYLQMNSLRAEDTAVYYCVRHGYYDGYHLFDYWGQGTLVTVSSGGGGSGGGGSGGGGSDIQMTQSPSSLSASVGDRVTISCRASQGISNHLNWFQQKPGRAPKPLIYYTSNLQSGVPSRFSGSGSGTDFTLTISSLQPEDFATYYCQQYFDRPYTFGGGTKVEIK

SEQ ID NO: 780 - protein, 498 aa, artificial
  BCMA-78 HL x CD3 HL bispecific molecule
EVQLVESGGGLVQPGGSLRLSCAASGFTFSNFDMAWVRQAPGKGLVWVSSITTGGGDTYYADSVKGRFTISRDNAKNTLYLQMNSLRAEDTAVYYCVRHGYYDGYHLFDYWGQGTLVTVSSGGGGSGGGGSGGGGSDIQMTQSPSSLSASVGDRVTISCRASQGISNHLNWFQQKPGRAPKPLIYYTSNLQSGVPSRFSGSGSGTDFTLTISSLQPEDFATYYCQQYFDRPYTFGGGTKVEIKSGGGGSEVQLVESGGGLVQPGGSLKLSCAASGFTFNKYAMNWVRQAPGKGLEWVARIRSKYNNYATYYADSVKDRFTISRDDSKNTAYLQMNNLKTEDTAVYYCVRHGNFGNSYISYWAYWGQGTLVTVSSGGGGSGGGGSGGGGSQTVVTQEPSLTVSPGGTVTLTCGSSTGAVTSGNYPNWVQQKPGQAPRGLIGGTKFLAPGTPARFSGSLLGGKAALTLSGVQPEDEAEYYCVLWYSNRWVFGGGTKLTVL

SEQ ID NO: 781 - protein, 5 aa, artificial
  VH CDR1 of BCMA-79
NFDMA

SEQ ID NO: 782 - protein, 17 aa, artificial
  VH CDR2 of BCMA-79
SITTGGGDTYYADSVKG

SEQ ID NO: 783 - protein, 12 aa, artificial
  VH CDR3 of BCMA-79
HGYYDGYHLFDY

SEQ ID NO: 784 - protein, 11 aa, artificial
  VL CDR1 of BCMA-79
RASQGISNHLN

SEQ ID NO: 785 - protein, 7 aa, artificial
  VL CDR2 of BCMA-79
YTSNLQS

SEQ ID NO: 786 - protein, 9 aa, artificial
  VL CDR3 of BCMA-79
QQYFDRPYT

SEQ ID NO: 787 - protein, 121 aa, artificial; identical to SEQ ID NO: 737
  VH of BCMA-79

SEQ ID NO: 788 - protein, 107 aa, artificial
  VL of BCMA-79
DIQMTQSPSSLSASVGDRVTISCRASQGISNHLNWYQQKPGKAPKPLIYYTSNLQSGVPSRFSGSGSGTDYTLTISSLQPEDFATYYCQQYFDRPYTFGGGTKVEIK

SEQ ID NO: 789 - protein, 243 aa, artificial
  BCMA-79 scFv
EVQLVESGGGLVQPGGSLRLSCAASGFTFSNFDMAWVRQAPGKGLVWVSSITTGGGDTYYADSVKGRFTISRDNAKNTLYLQMDSLRAEDTAVYYCVRHGYYDGYHLFDYWGQGTLVTVSSGGGGSGGGGSGGGGSDIQMTQSPSSLSASVGDRVTISCRASQGISNHLNWYQQKPGKAPKPLIYYTSNLQSGVPSRFSGSGSGTDYTLTISSLQPEDFATYYCQQYFDRPYTFGGGTKVEIK

SEQ ID NO: 790 - protein, 498 aa, artificial
  BCMA-79 HL x CD3 HL bispecific molecule
EVQLVESGGGLVQPGGSLRLSCAASGFTFSNFDMAWVRQAPGKGLVWVSSITTGGGDTYYADSVKGRFTISRDNAKNTLYLQMDSLRAEDTAVYYCVRHGYYDGYHLFDYWGQGTLVTVSSGGGGSGGGGSGGGGSDIQMTQSPSSLSASVGDRVTISCRASQGISNHLNWYQQKPGKAPKPLIYYTSNLQSGVPSRFSGSGSGTDYTLTISSLQPEDFATYYCQQYFDRPYTFGGGTKVEIKSGGGGSEVQLVESGGGLVQPGGSLKLSCAASGFTFNKYAMNWVRQAPGKGLEWVARIRSKYNNYATYYADSVKDRFTISRDDSKNTAYLQMNNLKTEDTAVYYCVRHGNFGNSYISYWAYWGQGTLVTVSSGGGGSGGGGSGGGGSQTVVTQEPSLTVSPGGTVTLTCGSSTGAVTSGNYPNWVQQKPGQAPRGLIGGTKFLAPGTPARFSGSLLGGKAALTLSGVQPEDEAEYYCVLWYSNRWVFGGGTKLTVL

SEQ ID NO: 791 - protein, 5 aa, artificial
  VH CDR1 of BCMA-80
NFDMA

SEQ ID NO: 792 - protein, 17 aa, artificial
  VH CDR2 of BCMA-80
SITTGGGDTYYADSVKG

SEQ ID NO: 793 - protein, 12 aa, artificial
  VH CDR3 of BCMA-80
HGYYDGYHLFDY

SEQ ID NO: 794 - protein, 11 aa, artificial
  VL CDR1 of BCMA-80
RASQGISNHLN

SEQ ID NO: 795 - protein, 7 aa, artificial
  VL CDR2 of BCMA-80
YTSNLQS

SEQ ID NO: 796 - protein, 9 aa, artificial
  VL CDR3 of BCMA-80
QQYFDRPYT

SEQ ID NO: 797 - protein, 121 aa, artificial; identical to SEQ ID NO: 737
  VH of BCMA-80

SEQ ID NO: 798 - protein, 107 aa, artificial
  VL of BCMA-80
DIQMTQSPSSLSASVGDRVTITCRASQGISNHLNWFQQKPGKAPKPLIYYTSNLQSGVPSRFSGSGSGTDFTLTISSLQPEDFATYYCQQYFDRPYTFGGGTKVEIK

SEQ ID NO: 799 - protein, 243 aa, artificial
  BCMA-80 scFv
EVQLVESGGGLVQPGGSLRLSCAASGFTFSNFDMAWVRQAPGKGLVWVSSITTGGGDTYYADSVKGRFTISRDNAKNTLYLQMDSLRAEDTAVYYCVRHGYYDGYHLFDYWGQGTLVTVSSGGGGSGGGGSGGGGSDIQMTQSPSSLSASVGDRVTITCRASQGISNHLNWFQQKPGKAPKPLIYYTSNLQSGVPSRFSGSGSGTDFTLTISSLQPEDFATYYCQQYFDRPYTFGGGTKVEIK

SEQ ID NO: 800 - protein, 498 aa, artificial
  BCMA-80 HL x CD3 HL bispecific molecule
EVQLVESGGGLVQPGGSLRLSCAASGFTFSNFDMAWVRQAPGKGLVWVSSITTGGGDTYYADSVKGRFTISRDNAKNTLYLQMDSLRAEDTAVYYCVRHGYYDGYHLFDYWGQGTLVTVSSGGGGSGGGGSGGGGSDIQMTQSPSSLSASVGDRVTITCRASQGISNHLNWFQQKPGKAPKPLIYYTSNLQSGVPSRFSGSGSGTDFTLTISSLQPEDFATYYCQQYFDRPYTFGGGTKVEIKSGGGGSEVQLVESGGGLVQPGGSLKLSCAASGFTFNKYAMNWVRQAPGKGLEWVARIRSKYNNYATYYADSVKDRFTISRDDSKNTAYLQMNNLKTEDTAVYYCVRHGNFGNSYISYWAYWGQGTLVTVSSGGGGSGGGGSGGGGSQTVVTQEPSLTVSPGGTVTLTCGSSTGAVTSGNYPNWVQQKPGQAPRGLIGGTKFLAPGTPARFSGSLLGGKAALTLSGVQPEDEAEYYCVLWYSNRWVFGGGTKLTVL

SEQ ID NO: 801 - protein, 5 aa, artificial
  VH CDR1 of BCMA-81
NFDMA

SEQ ID NO: 802 - protein, 17 aa, artificial
  VH CDR2 of BCMA-81
SITTGGGDTYYADSVKG

SEQ ID NO: 803 - protein, 12 aa, artificial
  VH CDR3 of BCMA-81
HGYYDGYHLFDY

SEQ ID NO: 804 - protein, 11 aa, artificial
  VL CDR1 of BCMA-81
RASQGISNHLN

SEQ ID NO: 805 - protein, 7 aa, artificial
  VL CDR2 of BCMA-81
YTSNLQS

SEQ ID NO: 806 - protein, 9 aa, artificial
  VL CDR3 of BCMA-81
QQYFDRPYT

SEQ ID NO: 807 - protein, 121 aa, artificial; identical to SEQ ID NO: 767
  VH of BCMA-81

SEQ ID NO: 808 - protein, 107 aa, artificial
  VL of BCMA-81
DIQMTQSPSSLSASVGERVTITCRASQGISNHLNWYQQKPGKAPKSLIYYTSNLQSGVPSRFSGSGSGTDFTLTISSLQPEDFATYYCQQYFDRPYTFGGGTKVEIK

SEQ ID NO: 809 - protein, 243 aa, artificial
  BCMA-81 scFv
EVQLVESGGGLVQPGRSLRLSCAASGFTFSNFDMAWVRQAPAKGLEWVSSITTGGGDTYYADSVKGRFTISRDNAKNTLYLQMNSLRAEDTAVYYCVRHGYYDGYHLFDYWGQGTLVTVSSGGGGSGGGGSGGGGSDIQMTQSPSSLSASVGERVTITCRASQGISNHLNWYQQKPGKAPKSLIYYTSNLQSGVPSRFSGSGSGTDFTLTISSLQPEDFATYYCQQYFDRPYTFGGGTKVEIK

SEQ ID NO: 810 - protein, 498 aa, artificial
  BCMA-81 HL x CD3 HL bispecific molecule
EVQLVESGGGLVQPGRSLRLSCAASGFTFSNFDMAWVRQAPAKGLEWVSSITTGGGDTYYADSVKGRFTISRDNAKNTLYLQMNSLRAEDTAVYYCVRHGYYDGYHLFDYWGQGTLVTVSSGGGGSGGGGSGGGGSDIQMTQSPSSLSASVGERVTITCRASQGISNHLNWYQQKPGKAPKSLIYYTSNLQSGVPSRFSGSGSGTDFTLTISSLQPEDFATYYCQQYFDRPYTFGGGTKVEIKSGGGGSEVQLVESGGGLVQPGGSLKLSCAASGFTFNKYAMNWVRQAPGKGLEWVARIRSKYNNYATYYADSVKDRFTISRDDSKNTAYLQMNNLKTEDTAVYYCVRHGNFGNSYISYWAYWGQGTLVTVSSGGGGSGGGGSGGGGSQTVVTQEPSLTVSPGGTVTLTCGSSTGAVTSGNYPNWVQQKPGQAPRGLIGGTKFLAPGTPARFSGSLLGGKAALTLSGVQPEDEAEYYCVLWYSNRWVFGGGTKLTVL

SEQ ID NO: 811 - protein, 5 aa, artificial
  VH CDR1 of BCMA-82
NFDMA

SEQ ID NO: 812 - protein, 17 aa, artificial
  VH CDR2 of BCMA-82
SITTGGGDTYYADSVKG

SEQ ID NO: 813 - protein, 12 aa, artificial
  VH CDR3 of BCMA-82
HGYYDGYHLFDY

SEQ ID NO: 814 - protein, 11 aa, artificial
  VL CDR1 of BCMA-82
RASQGISNHLN

SEQ ID NO: 815 - protein, 7 aa, artificial
  VL CDR2 of BCMA-82
YTSNLQS

SEQ ID NO: 816 - protein, 9 aa, artificial
  VL CDR3 of BCMA-82
QQYSNLPYT

SEQ ID NO: 817 - protein, 121 aa, artificial; identical to SEQ ID NO: 747
  VH of BCMA-82

SEQ ID NO: 818 - protein, 107 aa, artificial
  VL of BCMA-82
DIQMTQSPSSLSASVGDRVTISCRASQGISNHLNWFQQKPGRAPKPLIYYTSNLQSGVPSRFSGSGSGTDFTLTISSLQPEDFATYYCQQYSNLPYTFGGGTKVEIK

SEQ ID NO: 819 - protein, 243 aa, artificial
  BCMA-82 scFv
EVQLVESGGGLVQPGGSLRLSCAASGFTFSNFDMAWVRQAPGKGLVWVSSITTGGGDTYYADSVKGRFTISRDNAKNTLYLQMNSLRAEDTAVYYCVRHGYYDGYHLFDYWGQGTLVTVSSGGGGSGGGGSGGGGSDIQMTQSPSSLSASVGDRVTISCRASQGISNHLNWFQQKPGRAPKPLIYYTSNLQSGVPSRFSGSGSGTDFTLTISSLQPEDFATYYCQQYSNLPYTFGGGTKVEIK

SEQ ID NO: 820 - protein, 498 aa, artificial
  BCMA-82 HL x CD3 HL bispecific molecule
EVQLVESGGGLVQPGGSLRLSCAASGFTFSNFDMAWVRQAPGKGLVWVSSITTGGGDTYYADSVKGRFTISRDNAKNTLYLQMNSLRAEDTAVYYCVRHGYYDGYHLFDYWGQGTLVTVSSGGGGSGGGGSGGGGSDIQMTQSPSSLSASVGDRVTISCRASQGISNHLNWFQQKPGRAPKPLIYYTSNLQSGVPSRFSGSGSGTDFTLTISSLQPEDFATYYCQQYSNLPYTFGGGTKVEIKSGGGGSEVQLVESGGGLVQPGGSLKLSCAASGFTFNKYAMNWVRQAPGKGLEWVARIRSKYNNYATYYADSVKDRFTISRDDSKNTAYLQMNNLKTEDTAVYYCVRHGNFGNSYISYWAYWGQGTLVTVSSGGGGSGGGGSGGGGSQTVVTQEPSLTVSPGGTVTLTCGSSTGAVTSGNYPNWVQQKPGQAPRGLIGGTKFLAPGTPARFSGSLLGGKAALTLSGVQPEDEAEYYCVLWYSNRWVFGGGTKLTVL

SEQ ID NO: 821 - protein, 5 aa, artificial
  VH CDR1 of BCMA-83
NFDMA

SEQ ID NO: 822 - protein, 17 aa, artificial
  VH CDR2 of BCMA-83
SITTGGGDTYYADSVKG

SEQ ID NO: 823 - protein, 12 aa, artificial
  VH CDR3 of BCMA-83
HGYYDGYHLFDY

SEQ ID NO: 824 - protein, 11 aa, artificial
  VL CDR1 of BCMA-83
RASQGISNHLN

SEQ ID NO: 825 - protein, 7 aa, artificial
  VL CDR2 of BCMA-83
YTSNLQS

SEQ ID NO: 826 - protein, 9 aa, artificial
  VL CDR3 of BCMA-83
QQYSNLPYT

SEQ ID NO: 827 - protein, 121 aa, artificial; identical to SEQ ID NO: 737
  VH of BCMA-83

SEQ ID NO: 828 - protein, 107 aa, artificial
  VL of BCMA-83
DIQMTQSPSSLSASVGDRVTISCRASQGISNHLNWYQQKPGKAPKPLIYYTSNLQSGVPSRFSGSGSGTDYTLTISSLQPEDFATYYCQQYSNLPYTFGGGTKVEIK

SEQ ID NO: 829 - protein, 243 aa, artificial
  BCMA-83 scFv
EVQLVESGGGLVQPGGSLRLSCAASGFTFSNFDMAWVRQAPGKGLVWVSSITTGGGDTYYADSVKGRFTISRDNAKNTLYLQMDSLRAEDTAVYYCVRHGYYDGYHLFDYWGQGTLVTVSSGGGGSGGGGSGGGGSDIQMTQSPSSLSASVGDRVTISCRASQGISNHLNWYQQKPGKAPKPLIYYTSNLQSGVPSRFSGSGSGTDYTLTISSLQPEDFATYYCQQYSNLPYTFGGGTKVEIK

SEQ ID NO: 830 - protein, 498 aa, artificial
  BCMA-83 HL x CD3 HL bispecific molecule
EVQLVESGGGLVQPGGSLRLSCAASGFTFSNFDMAWVRQAPGKGLVWVSSITTGGGDTYYADSVKGRFTISRDNAKNTLYLQMDSLRAEDTAVYYCVRHGYYDGYHLFDYWGQGTLVTVSSGGGGSGGGGSGGGGSDIQMTQSPSSLSASVGDRVTISCRASQGISNHLNWYQQKPGKAPKPLIYYTSNLQSGVPSRFSGSGSGTDYTLTISSLQPEDFATYYCQQYSNLPYTFGGGTKVEIKSGGGGSEVQLVESGGGLVQPGGSLKLSCAASGFTFNKYAMNWVRQAPGKGLEWVARIRSKYNNYATYYADSVKDRFTISRDDSKNTAYLQMNNLKTEDTAVYYCVRHGNFGNSYISYWAYWGQGTLVTVSSGGGGSGGGGSGGGGSQTVVTQEPSLTVSPGGTVTLTCGSSTGAVTSGNYPNWVQQKPGQAPRGLIGGTKFLAPGTPARFSGSLLGGKAALTLSGVQPEDEAEYYCVLWYSNRWVFGGGTKLTVL

SEQ ID NO: 831 - protein, 5 aa, artificial
  VH CDR1 of BCMA-84
NFDMA

SEQ ID NO: 832 - protein, 17 aa, artificial
  VH CDR2 of BCMA-84
SITTGGGDTYYADSVKG

SEQ ID NO: 833 - protein, 12 aa, artificial
  VH CDR3 of BCMA-84
HGYYDGYHLFDY

SEQ ID NO: 834 - protein, 11 aa, artificial
  VL CDR1 of BCMA-84
RASQGISNHLN

SEQ ID NO: 835 - protein, 7 aa, artificial
  VL CDR2 of BCMA-84
YTSNLQS

SEQ ID NO: 836 - protein, 9 aa, artificial
  VL CDR3 of BCMA-84
QQYSNLPYT

SEQ ID NO: 837 - protein, 121 aa, artificial; identical to SEQ ID NO: 767
  VH of BCMA-84

SEQ ID NO: 838 - protein, 107 aa, artificial
  VL of BCMA-84
DIQMTQSPSSLSASVGERVTITCRASQGISNHLNWYQQKPGKAPKSLIYYTSNLQSGVPSRFSGSGSGTDFTLTISSLQPEDFATYYCQQYSNLPYTFGGGTKVEIK

SEQ ID NO: 839 - protein, 243 aa, artificial
  BCMA-84 scFv
EVQLVESGGGLVQPGRSLRLSCAASGFTFSNFDMAWVRQAPAKGLEWVSSITTGGGDTYYADSVKGRFTISRDNAKNTLYLQMNSLRAEDTAVYYCVRHGYYDGYHLFDYWGQGTLVTVSSGGGGSGGGGSGGGGSDIQMTQSPSSLSASVGERVTITCRASQGISNHLNWYQQKPGKAPKSLIYYTSNLQSGVPSRFSGSGSGTDFTLTISSLQPEDFATYYCQQYSNLPYTFGGGTKVEIK

SEQ ID NO: 840 - protein, 498 aa, artificial
  BCMA-84 HL x CD3 HL bispecific molecule
EVQLVESGGGLVQPGRSLRLSCAASGFTFSNFDMAWVRQAPAKGLEWVSSITTGGGDTYYADSVKGRFTISRDNAKNTLYLQMNSLRAEDTAVYYCVRHGYYDGYHLFDYWGQGTLVTVSSGGGGSGGGGSGGGGSDIQMTQSPSSLSASVGERVTITCRASQGISNHLNWYQQKPGKAPKSLIYYTSNLQSGVPSRFSGSGSGTDFTLTISSLQPEDFATYYCQQYSNLPYTFGGGTKVEIKSGGGGSEVQLVESGGGLVQPGGSLKLSCAASGFTFNKYAMNWVRQAPGKGLEWVARIRSKYNNYATYYADSVKDRFTISRDDSKNTAYLQMNNLKTEDTAVYYCVRHGNFGNSYISYWAYWGQGTLVTVSSGGGGSGGGGSGGGGSQTVVTQEPSLTVSPGGTVTLTCGSSTGAVTSGNYPNWVQQKPGQAPRGLIGGTKFLAPGTPARFSGSLLGGKAALTLSGVQPEDEAEYYCVLWYSNRWVFGGGTKLTVL

SEQ ID NO: 841 - protein, 5 aa, artificial
  VH CDR1 of BCMA-85
NFGMN

SEQ ID NO: 842 - protein, 17 aa, artificial
  VH CDR2 of BCMA-85
WINTYTGESIYADDFKG

SEQ ID NO: 843 - protein, 12 aa, artificial
  VH CDR3 of BCMA-85
GGVYGGYDAMDY

SEQ ID NO: 844 - protein, 11 aa, artificial
  VL CDR1 of BCMA-85
RASQDISNYLN

SEQ ID NO: 845 - protein, 7 aa, artificial
  VL CDR2 of BCMA-85
YTSRLHS

SEQ ID NO: 846 - protein, 9 aa, artificial
  VL CDR3 of BCMA-85
QQGNTLPWT

SEQ ID NO: 847 - protein, 121 aa, artificial
  VH of BCMA-85
QVQLVQSGSELKKPGASVKVSCKASGYTFTNFGMNWVRQAPGQGLEWMGWINTYTGESIYADDFKGRFVFSLDTSVTTAYLQINSLKDEDTAVYYCARGGVYGGYDAMDYWGQGTLVTVSS

SEQ ID NO: 848 - protein, 107 aa, artificial
  VL of BCMA-85
DIQMTQSPSSLSASLGDRVTITCRASQDISNYLNWYQQKPDKAPKLLIYYTSRLHSGVPSRFSGSGSGTDYTLTISSLEPEDIATYYCQQGNTLPWTFGQGTKVEIK

SEQ ID NO: 849 - protein, 243 aa, artificial
  BCMA-85 scFv
QVQLVQSGSELKKPGASVKVSCKASGYTFTNFGMNWVRQAPGQGLEWMGWINTYTGESIYADDFKGRFVFSLDTSVTTAYLQINSLKDEDTAVYYCARGGVYGGYDAMDYWGQGTLVTVSSGGGGSGGGGSGGGGSDIQMTQSPSSLSASLGDRVTITCRASQDISNYLNWYQQKPDKAPKLLIYYTSRLHSGVPSRFSGSGSGTDYTLTISSLEPEDIATYYCQQGNTLPWTFGQGTKVEIK

SEQ ID NO: 850 - protein, 498 aa, artificial
  BCMA-85 HL x CD3 HL bispecific molecule
QVQLVQSGSELKKPGASVKVSCKASGYTFTNFGMNWVRQAPGQGLEWMGWINTYTGESIYADDFKGRFVFSLDTSVTTAYLQINSLKDEDTAVYYCARGGVYGGYDAMDYWGQGTLVTVSSGGGGSGGGGSGGGGSDIQMTQSPSSLSASLGDRVTITCRASQDISNYLNWYQQKPDKAPKLLIYYTSRLHSGVPSRFSGSGSGTDYTLTISSLEPEDIATYYCQQGNTLPWTFGQGTKVEIKSGGGGSEVQLVESGGGLVQPGGSLKLSCAASGFTFNKYAMNWVRQAPGKGLEWVARIRSKYNNYATYYADSVKDRFTISRDDSKNTAYLQMNNLKTEDTAVYYCVRHGNFGNSYISYWAYWGQGTLVTVSSGGGGSGGGGSGGGGSQTVVTQEPSLTVSPGGTVTLTCGSSTGAVTSGNYPNWVQQKPGQAPRGLIGGTKFLAPGTPARFSGSLLGGKAALTLSGVQPEDEAEYYCVLWYSNRWVFGGGTKLTVL

SEQ ID NO: 851 - protein, 5 aa, artificial
  VH CDR1 of BCMA-86
NFGMN

SEQ ID NO: 852 - protein, 17 aa, artificial
  VH CDR2 of BCMA-86
WINTYTGESIYADDFKG

SEQ ID NO: 853 - protein, 12 aa, artificial
  VH CDR3 of BCMA-86
GGVYGGYDAMDY

SEQ ID NO: 854 - protein, 11 aa, artificial
  VL CDR1 of BCMA-86
RASQDISNYLN

SEQ ID NO: 855 - protein, 7 aa, artificial
  VL CDR2 of BCMA-86
YTSRLHS

SEQ ID NO: 856 - protein, 9 aa, artificial
  VL CDR3 of BCMA-86
QQGNTLPWT

SEQ ID NO: 857 - protein, 121 aa, artificial
  VH of BCMA-86
QVQLVQSGSELKKPGASVKVSCKASGYTFTNFGMNWVRQAPGQGLEWMGWINTYTGESIYADDFKGRFVFSSDTSVSTAYLQINSLKAEDTAVYFCARGGVYGGYDAMDYWGQGTLVTVSS

SEQ ID NO: 858 - protein, 107 aa, artificial
  VL of BCMA-86
DIQMTQTPSSLSASVGDRVTITCRASQDISNYLNWYQQKPGKALKLLIYYTSRLHSGVPSRFSGSGSGTDYSLTISNLQPEDIATYYCQQGNTLPWTFGQGTKVEIK

SEQ ID NO: 859 - protein, 243 aa, artificial
  BCMA-86 scFv
QVQLVQSGSELKKPGASVKVSCKASGYTFTNFGMNWVRQAPGQGLEWMGWINTYTGESIYADDFKGRFVFSSDTSVSTAYLQINSLKAEDTAVYFCARGGVYGGYDAMDYWGQGTLVTVSSGGGGSGGGGSGGGGSDIQMTQTPSSLSASVGDRVTITCRASQDISNYLNWYQQKPGKALKLLIYYTSRLHSGVPSRFSGSGSGTDYSLTISNLQPEDIATYYCQQGNTLPWTFGQGTKVEIK

SEQ ID NO: 860 - protein, 498 aa, artificial
  BCMA-86 HL x CD3 HL bispecific molecule
QVQLVQSGSELKKPGASVKVSCKASGYTFTNFGMNWVRQAPGQGLEWMGWINTYTGESIYADDFKGRFVFSSDTSVSTAYLQINSLKAEDTAVYFCARGGVYGGYDAMDYWGQGTLVTVSSGGGGSGGGGSGGGGSDIQMTQTPSSLSASVGDRVTITCRASQDISNYLNWYQQKPGKALKLLIYYTSRLHSGVPSRFSGSGSGTDYSLTISNLQPEDIATYYCQQGNTLPWTFGQGTKVEIKSGGGGSEVQLVESGGGLVQPGGSLKLSCAASGFTFNKYAMNWVRQAPGKGLEWVARIRSKYNNYATYYADSVKDRFTISRDDSKNTAYLQMNNLKTEDTAVYYCVRHGNFGNSYISYWAYWGQGTLVTVSSGGGGSGGGGSGGGGSQTVVTQEPSLTVSPGGTVTLTCGSSTGAVTSGNYPNWVQQKPGQAPRGLIGGTKFLAPGTPARFSGSLLGGKAALTLSGVQPEDEAEYYCVLWYSNRWVFGGGTKLTVL

SEQ ID NO: 861 - protein, 5 aa, artificial
  VH CDR1 of BCMA-87
NFGMN

SEQ ID NO: 862 - protein, 17 aa, artificial
  VH CDR2 of BCMA-87
WINTYTGESIYADDFKG

SEQ ID NO: 863 - protein, 12 aa, artificial
  VH CDR3 of BCMA-87
GGVYGGYDAMDY

SEQ ID NO: 864 - protein, 11 aa, artificial
  VL CDR1 of BCMA-87
RASQDISNYLN

SEQ ID NO: 865 - protein, 7 aa, artificial
  VL CDR2 of BCMA-87
YTSRLHS

SEQ ID NO: 866 - protein, 9 aa, artificial
  VL CDR3 of BCMA-87
QQGNTLPWT

SEQ ID NO: 867 - protein, 121 aa, artificial; identical to SEQ ID NO: 847
  VH of BCMA-87

SEQ ID NO: 868 - protein, 107 aa, artificial
  VL of BCMA-87
DIQMTQSPSSLSASVGDRVTITCRASQDISNYLNWYQQKPGKAPKLLIYYTSRLHSGVPSRFSGSGSGTDYTLTISSLEQEDIATYFCQQGNTLPWTFGQGTKVEIK

SEQ ID NO: 869 - protein, 243 aa, artificial
  BCMA-87 scFv
QVQLVQSGSELKKPGASVKVSCKASGYTFTNFGMNWVRQAPGQGLEWMGWINTYTGESIYADDFKGRFVFSLDTSVTTAYLQINSLKDEDTAVYYCARGGVYGGYDAMDYWGQGTLVTVSSGGGGSGGGGSGGGGSDIQMTQSPSSLSASVGDRVTITCRASQDISNYLNWYQQKPGKAPKLLIYYTSRLHSGVPSRFSGSGSGTDYTLTISSLEQEDIATYFCQQGNTLPWTFGQGTKVEIK

SEQ ID NO: 870 - protein, 498 aa, artificial
  BCMA-87 HL x CD3 HL bispecific molecule
QVQLVQSGSELKKPGASVKVSCKASGYTFTNFGMNWVRQAPGQGLEWMGWINTYTGESIYADDFKGRFVFSLDTSVTTAYLQINSLKDEDTAVYYCARGGVYGGYDAMDYWGQGTLVTVSSGGGGSGGGGSGGGGSDIQMTQSPSSLSASVGDRVTITCRASQDISNYLNWYQQKPGKAPKLLIYYTSRLHSGVPSRFSGSGSGTDYTLTISSLEQEDIATYFCQQGNTLPWTFGQGTKVEIKSGGGGSEVQLVESGGGLVQPGGSLKLSCAASGFTFNKYAMNWVRQAPGKGLEWVARIRSKYNNYATYYADSVKDRFTISRDDSKNTAYLQMNNLKTEDTAVYYCVRHGNFGNSYISYWAYWGQGTLVTVSSGGGGSGGGGSGGGGSQTVVTQEPSLTVSPGGTVTLTCGSSTGAVTSGNYPNWVQQKPGQAPRGLIGGTKFLAPGTPARFSGSLLGGKAALTLSGVQPEDEAEYYCVLWYSNRWVFGGGTKLTVL

SEQ ID NO: 871 - protein, 5 aa, artificial
  VH CDR1 of BCMA-88
NFGMN

SEQ ID NO: 872 - protein, 17 aa, artificial
  VH CDR2 of BCMA-88
WINTYTGESIYADDFKG

SEQ ID NO: 873 - protein, 12 aa, artificial
  VH CDR3 of BCMA-88
GGVYGGYDAMDY

SEQ ID NO: 874 - protein, 11 aa, artificial
  VL CDR1 of BCMA-88
RASQDISNYLN

SEQ ID NO: 875 - protein, 7 aa, artificial
  VL CDR2 of BCMA-88
YTSRLHS

SEQ ID NO: 876 - protein, 9 aa, artificial
  VL CDR3 of BCMA-88
QSFATLPWT

SEQ ID NO: 877 - protein, 121 aa, artificial; identical to SEQ ID NO: 857
  VH of BCMA-88

SEQ ID NO: 878 - protein, 107 aa, artificial
  VL of BCMA-88
DIQMTQTPSSLSASVGDRVTITCRASQDISNYLNWYQQKPGKALKLLIYYTSRLHSGVPSRFSGSGSGTDYSLTISNLQPEDIATYYCQSFATLPWTFGQGTKVEIK

SEQ ID NO: 879 - protein, 243 aa, artificial
  BCMA-88 scFv
QVQLVQSGSELKKPGASVKVSCKASGYTFTNFGMNWVRQAPGQGLEWMGWINTYTGESIYADDFKGRFVFSSDTSVSTAYLQINSLKAEDTAVYFCARGGVYGGYDAMDYWGQGTLVTVSSGGGGSGGGGSGGGGSDIQMTQTPSSLSASVGDRVTITCRASQDISNYLNWYQQKPGKALKLLIYYTSRLHSGVPSRFSGSGSGTDYSLTISNLQPEDIATYYCQSFATLPWTFGQGTKVEIK

SEQ ID NO: 880 - protein, 498 aa, artificial
  BCMA-88 HL x CD3 HL bispecific molecule
QVQLVQSGSELKKPGASVKVSCKASGYTFTNFGMNWVRQAPGQGLEWMGWINTYTGESIYADDFKGRFVFSSDTSVSTAYLQINSLKAEDTAVYFCARGGVYGGYDAMDYWGQGTLVTVSSGGGGSGGGGSGGGGSDIQMTQTPSSLSASVGDRVTITCRASQDISNYLNWYQQKPGKALKLLIYYTSRLHSGVPSRFSGSGSGTDYSLTISNLQPEDIATYYCQSFATLPWTFGQGTKVEIKSGGGGSEVQLVESGGGLVQPGGSLKLSCAASGFTFNKYAMNWVRQAPGKGLEWVARIRSKYNNYATYYADSVKDRFTISRDDSKNTAYLQMNNLKTEDTAVYYCVRHGNFGNSYISYWAYWGQGTLVTVSSGGGGSGGGGSGGGGSQTVVTQEPSLTVSPGGTVTLTCGSSTGAVTSGNYPNWVQQKPGQAPRGLIGGTKFLAPGTPARFSGSLLGGKAALTLSGVQPEDEAEYYCVLWYSNRWVFGGGTKLTVL

SEQ ID NO: 881 - protein, 5 aa, artificial
  VH CDR1 of BCMA-89
NFGMN

SEQ ID NO: 882 - protein, 17 aa, artificial
  VH CDR2 of BCMA-89
WINTYTGESIYADDFKG

SEQ ID NO: 883 - protein, 12 aa, artificial
  VH CDR3 of BCMA-89
GGVYGGYDAMDY

SEQ ID NO: 884 - protein, 11 aa, artificial
  VL CDR1 of BCMA-89
RASQDISNYLN

SEQ ID NO: 885 - protein, 7 aa, artificial
  VL CDR2 of BCMA-89
YTSRLHS

SEQ ID NO: 886 - protein, 9 aa, artificial
  VL CDR3 of BCMA-89
QSFATLPWT

SEQ ID NO: 887 - protein, 121 aa, artificial
  VH of BCMA-89
QVQLVQSGSELKKPGASVKISCKASGYTFTNFGMNWVRQAPGQGLEWMGWINTYTGESIYADDFKGRFVFSSDTSVSTAYLQINNLKAEDTAVYYCARGGVYGGYDAMDYWGQGTLVTVSS

SEQ ID NO: 888 - protein, 107 aa, artificial
  VL of BCMA-89
DIQMTQSPSSLSASVGDRVTISCRASQDISNYLNWYQQKPGKAPKLLIYYTSRLHSGVPSRFSGSGSGTDYTFTISNLQPEDIATYYCQSFATLPWTFGQGTKVEIK

SEQ ID NO: 889 - protein, 243 aa, artificial
  BCMA-89 scFv
QVQLVQSGSELKKPGASVKISCKASGYTFTNFGMNWVRQAPGQGLEWMGWINTYTGESIYADDFKGRFVFSSDTSVSTAYLQINNLKAEDTAVYYCARGGVYGGYDAMDYWGQGTLVTVSSGGGGSGGGGSGGGGSDIQMTQSPSSLSASVGDRVTISCRASQDISNYLNWYQQKPGKAPKLLIYYTSRLHSGVPSRFSGSGSGTDYTFTISNLQPEDIATYYCQSFATLPWTFGQGTKVEIK

SEQ ID NO: 890 - protein, 498 aa, artificial
  BCMA-89 HL x CD3 HL bispecific molecule
QVQLVQSGSELKKPGASVKISCKASGYTFTNFGMNWVRQAPGQGLEWMGWINTYTGESIYADDFKGRFVFSSDTSVSTAYLQINNLKAEDTAVYYCARGGVYGGYDAMDYWGQGTLVTVSSGGGGSGGGGSGGGGSDIQMTQSPSSLSASVGDRVTISCRASQDISNYLNWYQQKPGKAPKLLIYYTSRLHSGVPSRFSGSGSGTDYTFTISNLQPEDIATYYCQSFATLPWTFGQGTKVEIKSGGGGSEVQLVESGGGLVQPGGSLKLSCAASGFTFNKYAMNWVRQAPGKGLEWVARIRSKYNNYATYYADSVKDRFTISRDDSKNTAYLQMNNLKTEDTAVYYCVRHGNFGNSYISYWAYWGQGTLVTVSSGGGGSGGGGSGGGGSQTVVTQEPSLTVSPGGTVTLTCGSSTGAVTSGNYPNWVQQKPGQAPRGLIGGTKFLAPGTPARFSGSLLGGKAALTLSGVQPEDEAEYYCVLWYSNRWVFGGGTKLTVL

SEQ ID NO: 891 - protein, 5 aa, artificial
  VH CDR1 of BCMA-90
NFGMN

SEQ ID NO: 892 - protein, 17 aa, artificial
  VH CDR2 of BCMA-90
WINTYTGESIYADDFKG

SEQ ID NO: 893 - protein, 12 aa, artificial
  VH CDR3 of BCMA-90
GGVYGGYDAMDY

SEQ ID NO: 894 - protein, 11 aa, artificial
  VL CDR1 of BCMA-90
RASQDISNYLN

SEQ ID NO: 895 - protein, 7 aa, artificial
  VL CDR2 of BCMA-90
YTSRLHS

SEQ ID NO: 896 - protein, 9 aa, artificial
  VL CDR3 of BCMA-90
QSFATLPWT

SEQ ID NO: 897 - protein, 121 aa, artificial; identical to SEQ ID NO: 847
  VH of BCMA-90

SEQ ID NO: 898 - protein, 107 aa, artificial
  VL of BCMA-90
DIQMTQSPSSLSASLGDRVTITCRASQDISNYLNWYQQKPDKAPKLLIYYTSRLHSGVPSRFSGSGSGTDYTLTISSLEPEDIATYYCQSFATLPWTFGQGTKVEIK

SEQ ID NO: 899 - protein, 243 aa, artificial
  BCMA-90 scFv
QVQLVQSGSELKKPGASVKVSCKASGYTFTNFGMNWVRQAPGQGLEWMGWINTYTGESIYADDFKGRFVFSLDTSVTTAYLQINSLKDEDTAVYYCARGGVYGGYDAMDYWGQGTLVTVSSGGGGSGGGGSGGGGSDIQMTQSPSSLSASLGDRVTITCRASQDISNYLNWYQQKPDKAPKLLIYYTSRLHSGVPSRFSGSGSGTDYTLTISSLEPEDIATYYCQSFATLPWTFGQGTKVEIK

SEQ ID NO: 900 - protein, 498 aa, artificial
  BCMA-90 HL x CD3 HL bispecific molecule
QVQLVQSGSELKKPGASVKVSCKASGYTFTNFGMNWVRQAPGQGLEWMGWINTYTGESIYADDFKGRFVFSLDTSVTTAYLQINSLKDEDTAVYYCARGGVYGGYDAMDYWGQGTLVTVSSGGGGSGGGGSGGGGSDIQMTQSPSSLSASLGDRVTITCRASQDISNYLNWYQQKPDKAPKLLIYYTSRLHSGVPSRFSGSGSGTDYTLTISSLEPEDIATYYCQSFATLPWTFGQGTKVEIKSGGGGSEVQLVESGGGLVQPGGSLKLSCAASGFTFNKYAMNWVRQAPGKGLEWVARIRSKYNNYATYYADSVKDRFTISRDDSKNTAYLQMNNLKTEDTAVYYCVRHGNFGNSYISYWAYWGQGTLVTVSSGGGGSGGGGSGGGGSQTVVTQEPSLTVSPGGTVTLTCGSSTGAVTSGNYPNWVQQKPGQAPRGLIGGTKFLAPGTPARFSGSLLGGKAALTLSGVQPEDEAEYYCVLWYSNRWVFGGGTKLTVL

SEQ ID NO: 901 - protein, 5 aa, artificial
  VH CDR1 of BCMA-91
NFGMN

SEQ ID NO: 902 - protein, 17 aa, artificial
  VH CDR2 of BCMA-91
WINTYTGESIYADDFKG

SEQ ID NO: 903 - protein, 12 aa, artificial
  VH CDR3 of BCMA-91
GGVYGGYDAMDY

SEQ ID NO: 904 - protein, 11 aa, artificial
  VL CDR1 of BCMA-91
RASQDISNYLN

SEQ ID NO: 905 - protein, 7 aa, artificial
  VL CDR2 of BCMA-91
YTSRLHS

SEQ ID NO: 906 - protein, 9 aa, artificial
  VL CDR3 of BCMA-91
QSFATLPWT

SEQ ID NO: 907 - protein, 121 aa, artificial; identical to SEQ ID NO: 847
  VH of BCMA-91

SEQ ID NO: 908 - protein, 107 aa, artificial
  VL of BCMA-91
DIQMTQSPSSLSASVGDRVTITCRASQDISNYLNWYQQKPGKAPKLLIYYTSRLHSGVPSRFSGSGSGTDYTLTISSLEQEDIATYFCQSFATLPWTFGQGTKVEIK

SEQ ID NO: 909 - protein, 243 aa, artificial
  BCMA-91 scFv
QVQLVQSGSELKKPGASVKVSCKASGYTFTNFGMNWVRQAPGQGLEWMGWINTYTGESIYADDFKGRFVFSLDTSVTTAYLQINSLKDEDTAVYYCARGGVYGGYDAMDYWGQGTLVTVSSGGGGSGGGGSGGGGSDIQMTQSPSSLSASVGDRVTITCRASQDISNYLNWYQQKPGKAPKLLIYYTSRLHSGVPSRFSGSGSGTDYTLTISSLEQEDIATYFCQSFATLPWTFGQGTKVEIK

SEQ ID NO: 910 - protein, 498 aa, artificial
  BCMA-91 HL x CD3 HL bispecific molecule
QVQLVQSGSELKKPGASVKVSCKASGYTFTNFGMNWVRQAPGQGLEWMGWINTYTGESIYADDFKGRFVFSLDTSVTTAYLQINSLKDEDTAVYYCARGGVYGGYDAMDYWGQGTLVTVSSGGGGSGGGGSGGGGSDIQMTQSPSSLSASVGDRVTITCRASQDISNYLNWYQQKPGKAPKLLIYYTSRLHSGVPSRFSGSGSGTDYTLTISSLEQEDIATYFCQSFATLPWTFGQGTKVEIKSGGGGSEVQLVESGGGLVQPGGSLKLSCAASGFTFNKYAMNWVRQAPGKGLEWVARIRSKYNNYATYYADSVKDRFTISRDDSKNTAYLQMNNLKTEDTAVYYCVRHGNFGNSYISYWAYWGQGTLVTVSSGGGGSGGGGSGGGGSQTVVTQEPSLTVSPGGTVTLTCGSSTGAVTSGNYPNWVQQKPGQAPRGLIGGTKFLAPGTPARFSGSLLGGKAALTLSGVQPEDEAEYYCVLWYSNRWVFGGGTKLTVL

SEQ ID NO: 911 - protein, 5 aa, artificial
  VH CDR1 of BCMA-92
NFGMN

SEQ ID NO: 912 - protein, 17 aa, artificial
  VH CDR2 of BCMA-92
WINTYTGESIYADDFKG

SEQ ID NO: 913 - protein, 12 aa, artificial
  VH CDR3 of BCMA-92
GGVYGGYDAMDY

SEQ ID NO: 914 - protein, 11 aa, artificial
  VL CDR1 of BCMA-92
RASQDISNYLN

SEQ ID NO: 915 - protein, 7 aa, artificial
  VL CDR2 of BCMA-92
YTSRLHS

SEQ ID NO: 916 - protein, 9 aa, artificial
  VL CDR3 of BCMA-92
QHFRTLPWT

SEQ ID NO: 917 - protein, 121 aa, artificial; identical to SEQ ID NO: 847
  VH of BCMA-92

SEQ ID NO: 918 - protein, 107 aa, artificial
  VL of BCMA-92
DIQMTQSPSSLSASLGDRVTITCRASQDISNYLNWYQQKPDKAPKLLIYYTSRLHSGVPSRFSGSGSGTDYTLTISSLEPEDIATYYCQHFRTLPWTFGQGTKVEIK

SEQ ID NO: 919 - protein, 243 aa, artificial
  BCMA-92 scFv
QVQLVQSGSELKKPGASVKVSCKASGYTFTNFGMNWVRQAPGQGLEWMGWINTYTGESIYADDFKGRFVFSLDTSVTTAYLQINSLKDEDTAVYYCARGGVYGGYDAMDYWGQGTLVTVSSGGGGSGGGGSGGGGSDIQMTQSPSSLSASLGDRVTITCRASQDISNYLNWYQQKPDKAPKLLIYYTSRLHSGVPSRFSGSGSGTDYTLTISSLEPEDIATYYCQHFRTLPWTFGQGTKVEIK

SEQ ID NO: 920 - protein, 498 aa, artificial
  BCMA-92 HL x CD3 HL bispecific molecule
QVQLVQSGSELKKPGASVKVSCKASGYTFTNFGMNWVRQAPGQGLEWMGWINTYTGESIYADDFKGRFVFSLDTSVTTAYLQINSLKDEDTAVYYCARGGVYGGYDAMDYWGQGTLVTVSSGGGGSGGGGSGGGGSDIQMTQSPSSLSASLGDRVTITCRASQDISNYLNWYQQKPDKAPKLLIYYTSRLHSGVPSRFSGSGSGTDYTLTISSLEPEDIATYYCQHFRTLPWTFGQGTKVEIKSGGGGSEVQLVESGGGLVQPGGSLKLSCAASGFTFNKYAMNWVRQAPGKGLEWVARIRSKYNNYATYYADSVKDRFTISRDDSKNTAYLQMNNLKTEDTAVYYCVRHGNFGNSYISYWAYWGQGTLVTVSSGGGGSGGGGSGGGGSQTVVTQEPSLTVSPGGTVTLTCGSSTGAVTSGNYPNWVQQKPGQAPRGLIGGTKFLAPGTPARFSGSLLGGKAALTLSGVQPEDEAEYYCVLWYSNRWVFGGGTKLTVL

SEQ ID NO: 921 - protein, 5 aa, artificial
  VH CDR1 of BCMA-93
NFGMN

SEQ ID NO: 922 - protein, 17 aa, artificial
  VH CDR2 of BCMA-93
WINTYTGESIYADDFKG

SEQ ID NO: 923 - protein, 12 aa, artificial
  VH CDR3 of BCMA-93
GGVYGGYDAMDY

SEQ ID NO: 924 - protein, 11 aa, artificial
  VL CDR1 of BCMA-93
RASQDISNYLN

SEQ ID NO: 925 - protein, 7 aa, artificial
  VL CDR2 of BCMA-93
YTSRLHS

SEQ ID NO: 926 - protein, 9 aa, artificial
  VL CDR3 of BCMA-93
QHFRTLPWT

SEQ ID NO: 927 - protein, 121 aa, artificial; identical to SEQ ID NO: 857
  VH of BCMA-93

SEQ ID NO: 928 - protein, 107 aa, artificial
  VL of BCMA-93
DIQMTQTPSSLSASVGDRVTITCRASQDISNYLNWYQQKPGKALKLLIYYTSRLHSGVPSRFSGSGSGTDYSLTISNLQPEDIATYYCQHFRTLPWTFGQGTKVEIK

SEQ ID NO: 929 - protein, 243 aa, artificial
  BCMA-93 scFv
QVQLVQSGSELKKPGASVKVSCKASGYTFTNFGMNWVRQAPGQGLEWMGWINTYTGESIYADDFKGRFVFSSDTSVSTAYLQINSLKAEDTAVYFCARGGVYGGYDAMDYWGQGTLVTVSSGGGGSGGGGSGGGGSDIQMTQTPSSLSASVGDRVTITCRASQDISNYLNWYQQKPGKALKLLIYYTSRLHSGVPSRFSGSGSGTDYSLTISNLQPEDIATYYCQHFRTLPWTFGQGTKVEIK

SEQ ID NO: 930 - protein, 498 aa, artificial
  BCMA-93 HL x CD3 HL bispecific molecule
QVQLVQSGSELKKPGASVKVSCKASGYTFTNFGMNWVRQAPGQGLEWMGWINTYTGESIYADDFKGRFVFSSDTSVSTAYLQINSLKAEDTAVYFCARGGVYGGYDAMDYWGQGTLVTVSSGGGGSGGGGSGGGGSDIQMTQTPSSLSASVGDRVTITCRASQDISNYLNWYQQKPGKALKLLIYYTSRLHSGVPSRFSGSGSGTDYSLTISNLQPEDIATYYCQHFRTLPWTFGQGTKVEIKSGGGGSEVQLVESGGGLVQPGGSLKLSCAASGFTFNKYAMNWVRQAPGKGLEWVARIRSKYNNYATYYADSVKDRFTISRDDSKNTAYLQMNNLKTEDTAVYYCVRHGNFGNSYISYWAYWGQGTLVTVSSGGGGSGGGGSGGGGSQTVVTQEPSLTVSPGGTVTLTCGSSTGAVTSGNYPNWVQQKPGQAPRGLIGGTKFLAPGTPARFSGSLLGGKAALTLSGVQPEDEAEYYCVLWYSNRWVFGGGTKLTVL

SEQ ID NO: 931 - protein, 5 aa, artificial
  VH CDR1 of BCMA-94
NFGMN

SEQ ID NO: 932 - protein, 17 aa, artificial
  VH CDR2 of BCMA-94
WINTYTGESIYADDFKG

SEQ ID NO: 933 - protein, 12 aa, artificial
  VH CDR3 of BCMA-94
GGVYGGYDAMDY

SEQ ID NO: 934 - protein, 11 aa, artificial
  VL CDR1 of BCMA-94
RASQDISNYLN

SEQ ID NO: 935 - protein, 7 aa, artificial
  VL CDR2 of BCMA-94
YTSRLHS

SEQ ID NO: 936 - protein, 9 aa, artificial
  VL CDR3 of BCMA-94
QHFRTLPWT

SEQ ID NO: 937 - protein, 121 aa, artificial; identical to SEQ ID NO: 847
  VH of BCMA-94

SEQ ID NO: 938 - protein, 107 aa, artificial
  VL of BCMA-94
DIQMTQSPSSLSASVGDRVTITCRASQDISNYLNWYQQKPGKAPKLLIYYTSRLHSGVPSRFSGSGSGTDYTLTISSLEQEDIATYFCQHFRTLPWTFGQGTKVEIK

SEQ ID NO: 939 - protein, 243 aa, artificial
  BCMA-94 scFv
QVQLVQSGSELKKPGASVKVSCKASGYTFTNFGMNWVRQAPGQGLEWMGWINTYTGESIYADDFKGRFVFSLDTSVTTAYLQINSLKDEDTAVYYCARGGVYGGYDAMDYWGQGTLVTVSSGGGGSGGGGSGGGGSDIQMTQSPSSLSASVGDRVTITCRASQDISNYLNWYQQKPGKAPKLLIYYTSRLHSGVPSRFSGSGSGTDYTLTISSLEQEDIATYFCQHFRTLPWTFGQGTKVEIK

SEQ ID NO: 940 - protein, 498 aa, artificial
  BCMA-94 HL x CD3 HL bispecific molecule
QVQLVQSGSELKKPGASVKVSCKASGYTFTNFGMNWVRQAPGQGLEWMGWINTYTGESIYADDFKGRFVFSLDTSVTTAYLQINSLKDEDTAVYYCARGGVYGGYDAMDYWGQGTLVTVSSGGGGSGGGGSGGGGSDIQMTQSPSSLSASVGDRVTITCRASQDISNYLNWYQQKPGKAPKLLIYYTSRLHSGVPSRFSGSGSGTDYTLTISSLEQEDIATYFCQHFRTLPWTFGQGTKVEIKSGGGGSEVQLVESGGGLVQPGGSLKLSCAASGFTFNKYAMNWVRQAPGKGLEWVARIRSKYNNYATYYADSVKDRFTISRDDSKNTAYLQMNNLKTEDTAVYYCVRHGNFGNSYISYWAYWGQGTLVTVSSGGGGSGGGGSGGGGSQTVVTQEPSLTVSPGGTVTLTCGSSTGAVTSGNYPNWVQQKPGQAPRGLIGGTKFLAPGTPARFSGSLLGGKAALTLSGVQPEDEAEYYCVLWYSNRWVFGGGTKLTVL

SEQ ID NO: 941 - protein, 5 aa, artificial
  VH CDR1 of BCMA-95
NFGMN

SEQ ID NO: 942 - protein, 17 aa, artificial
  VH CDR2 of BCMA-95
WINTYTGESIYADDFKG

SEQ ID NO: 943 - protein, 12 aa, artificial
  VH CDR3 of BCMA-95
GGVYGGYDAMDY

SEQ ID NO: 944 - protein, 11 aa, artificial
  VL CDR1 of BCMA-95
RASQDISNYLN

SEQ ID NO: 945 - protein, 7 aa, artificial
  VL CDR2 of BCMA-95
YTSRLHS

SEQ ID NO: 946 - protein, 9 aa, artificial
  VL CDR3 of BCMA-95
QHFRTLPWT

SEQ ID NO: 947 - protein, 121 aa, artificial; identical to SEQ ID NO: 887
  VH of BCMA-95

SEQ ID NO: 948 - protein, 107 aa, artificial
  VL of BCMA-95
DIQMTQSPSSLSASVGDRVTISCRASQDISNYLNWYQQKPGKAPKLLIYYTSRLHSGVPSRFSGSGSGTDYTFTISNLQPEDIATYFCQHFRTLPWTFGQGTKVEIK

SEQ ID NO: 949 - protein, 243 aa, artificial
  BCMA-95 scFv
QVQLVQSGSELKKPGASVKISCKASGYTFTNFGMNWVRQAPGQGLEWMGWINTYTGESIYADDFKGRFVFSSDTSVSTAYLQINNLKAEDTAVYYCARGGVYGGYDAMDYWGQGTLVTVSSGGGGSGGGGSGGGGSDIQMTQSPSSLSASVGDRVTISCRASQDISNYLNWYQQKPGKAPKLLIYYTSRLHSGVPSRFSGSGSGTDYTFTISNLQPEDIATYFCQHFRTLPWTFGQGTKVEIK

SEQ ID NO: 950 - protein, 498 aa, artificial
  BCMA-95 HL x CD3 HL bispecific molecule
QVQLVQSGSELKKPGASVKISCKASGYTFTNFGMNWVRQAPGQGLEWMGWINTYTGESIYADDFKGRFVFSSDTSVSTAYLQINNLKAEDTAVYYCARGGVYGGYDAMDYWGQGTLVTVSSGGGGSGGGGSGGGGSDIQMTQSPSSLSASVGDRVTISCRASQDISNYLNWYQQKPGKAPKLLIYYTSRLHSGVPSRFSGSGSGTDYTFTISNLQPEDIATYFCQHFRTLPWTFGQGTKVEIKSGGGGSEVQLVESGGGLVQPGGSLKLSCAASGFTFNKYAMNWVRQAPGKGLEWVARIRSKYNNYATYYADSVKDRFTISRDDSKNTAYLQMNNLKTEDTAVYYCVRHGNFGNSYISYWAYWGQGTLVTVSSGGGGSGGGGSGGGGSQTVVTQEPSLTVSPGGTVTLTCGSSTGAVTSGNYPNWVQQKPGQAPRGLIGGTKFLAPGTPARFSGSLLGGKAALTLSGVQPEDEAEYYCVLWYSNRWVFGGGTKLTVL

SEQ ID NO: 951 - protein, 5 aa, artificial
  VH CDR1 of BCMA-96
NFGMN

SEQ ID NO: 952 - protein, 17 aa, artificial
  VH CDR2 of BCMA-96
WINTYTGESIYADDFKG

SEQ ID NO: 953 - protein, 12 aa, artificial
  VH CDR3 of BCMA-96
GGVYGGYDAMDY

SEQ ID NO: 954 - protein, 11 aa, artificial
  VL CDR1 of BCMA-96
RASQDISNYLN

SEQ ID NO: 955 - protein, 7 aa, artificial
  VL CDR2 of BCMA-96
YTSRLHS

SEQ ID NO: 956 - protein, 9 aa, artificial
  VL CDR3 of BCMA-96
QQGNTLPWT

SEQ ID NO: 957 - protein, 121 aa, artificial; identical to SEQ ID NO: 887
  VH of BCMA-96

SEQ ID NO: 958 - protein, 107 aa, artificial
  VL of BCMA-96
DIQMTQSPSSLSASVGDRVTISCRASQDISNYLNWYQQKPGKAPKLLIYYTSRLHSGVPSRFSGSGSGTDYTFTISNLQPEDIATYYCQQGNTLPWTFGQGTKVEIK

SEQ ID NO: 959 - protein, 243 aa, artificial
  BCMA-96 of scFv
QVQLVQSGSELKKPGASVKISCKASGYTFTNFGMNWVRQAPGQGLEWMGWINTYTGESIYADDFKGRFVFSSDTSVSTAYLQINNLKAEDTAVYYCARGGVYGGYDAMDYWGQGTLVTVSSGGGGSGGGGSGGGGSDIQMTQSPSSLSASVGDRVTISCRASQDISNYLNWYQQKPGKAPKLLIYYTSRLHSGVPSRFSGSGSGTDYTFTISNLQPEDIATYYCQQGNTLPWTFGQGTKVEIK

SEQ ID NO: 960 - protein, 498 aa, artificial
  BCMA-96 HL x CD3 HL bispecific molecule
QVQLVQSGSELKKPGASVKISCKASGYTFTNFGMNWVRQAPGQGLEWMGWINTYTGESIYADDFKGRFVFSSDTSVSTAYLQINNLKAEDTAVYYCARGGVYGGYDAMDYWGQGTLVTVSSGGGGSGGGGSGGGGSDIQMTQSPSSLSASVGDRVTISCRASQDISNYLNWYQQKPGKAPKLLIYYTSRLHSGVPSRFSGSGSGTDYTFTISNLQPEDIATYYCQQGNTLPWTFGQGTKVEIKSGGGGSEVQLVESGGGLVQPGGSLKLSCAASGFTFNKYAMNWVRQAPGKGLEWVARIRSKYNNYATYYADSVKDRFTISRDDSKNTAYLQMNNLKTEDTAVYYCVRHGNFGNSYISYWAYWGQGTLVTVSSGGGGSGGGGSGGGGSQTVVTQEPSLTVSPGGTVTLTCGSSTGAVTSGNYPNWVQQKPGQAPRGLIGGTKFLAPGTPARFSGSLLGGKAALTLSGVQPEDEAEYYCVLWYSNRWVFGGGTKLTVL

SEQ ID NO: 961 - protein, 5 aa, artificial
  VH CDR1 of BCMA-97
NFDMA

SEQ ID NO: 962 - protein, 17 aa, artificial
  VH CDR2 of BCMA-97
SITTGGGDTYYADSVKG

SEQ ID NO: 963 - protein, 12 aa, artificial
  VH CDR3 of BCMA-97
HGYYDGYHLFDY

SEQ ID NO: 964 - protein, 11 aa, artificial
  VL CDR1 of BCMA-97
RASQGISNNLN

SEQ ID NO: 965 - protein, 7 aa, artificial
  VL CDR2 of BCMA-97
YTSNLQS

SEQ ID NO: 966 - protein, 9 aa, artificial
  VL CDR3 of BCMA-97
QQFTSLPYT

SEQ ID NO: 967 - protein, 121 aa, artificial; identical to SEQ ID NO: 747
  VH of BCMA-97

SEQ ID NO: 968 - protein, 107 aa, artificial
  VL of BCMA-97
DIQMTQSPSSMSASVGDRVTITCRASQGISNNLNWYQQKPGKAPKSLIYYTSNLQSGVPSRFSGSGSGTDYTLTISSLQPEDFATYYCQQFTSLPYTFGQGTKLEIK

SEQ ID NO: 969 - protein, 243 aa, artificial
  BCMA-97 scFv
EVQLVESGGGLVQPGGSLRLSCAASGFTFSNFDMAWVRQAPGKGLVWVSSITTGGGDTYYADSVKGRFTISRDNAKNTLYLQMNSLRAEDTAVYYCVRHGYYDGYHLFDYWGQGTLVTVSSGGGGSGGGGSGGGGSDIQMTQSPSSMSASVGDRVTITCRASQGISNNLNWYQQKPGKAPKSLIYYTSNLQSGVPSRFSGSGSGTDYTLTISSLQPEDFATYYCQQFTSLPYTFGQGTKLEIK

SEQ ID NO: 970 - protein, 498 aa, artificial
  BCMA-97 HL x CD3 HL bispecific molecule
EVQLVESGGGLVQPGGSLRLSCAASGFTFSNFDMAWVRQAPGKGLVWVSSITTGGGDTYYADSVKGRFTISRDNAKNTLYLQMNSLRAEDTAVYYCVRHGYYDGYHLFDYWGQGTLVTVSSGGGGSGGGGSGGGGSDIQMTQSPSSMSASVGDRVTITCRASQGISNNLNWYQQKPGKAPKSLIYYTSNLQSGVPSRFSGSGSGTDYTLTISSLQPEDFATYYCQQFTSLPYTFGQGTKLEIKSGGGGSEVQLVESGGGLVQPGGSLKLSCAASGFTFNKYAMNWVRQAPGKGLEWVARIRSKYNNYATYYADSVKDRFTISRDDSKNTAYLQMNNLKTEDTAVYYCVRHGNFGNSYISYWAYWGQGTLVTVSSGGGGSGGGGSGGGGSQTVVTQEPSLTVSPGGTVTLTCGSSTGAVTSGNYPNWVQQKPGQAPRGLIGGTKFLAPGTPARFSGSLLGGKAALTLSGVQPEDEAEYYCVLWYSNRWVFGGGTKLTVL

SEQ ID NO: 971 - protein, 5 aa, artificial
  VH CDR1 of BCMA-98
NFDMA

SEQ ID NO: 972 - protein, 17 aa, artificial
  VH CDR2 of BCMA-98
SITTGGGDTYYADSVKG

SEQ ID NO: 973 - protein, 12 aa, artificial
  VH CDR3 of BCMA-98
HGYYDGYHLFDY

SEQ ID NO: 974 - protein, 11 aa, artificial
  VL CDR1 of BCMA-98
RANQGISNNLN

SEQ ID NO: 975 - protein, 7 aa, artificial
  VL CDR2 of BCMA-98
YTSNLQS

SEQ ID NO: 976 - protein, 9 aa, artificial
  VL CDR3 of BCMA-98
QQFTSLPYT

SEQ ID NO: 977 - protein, 121 aa, artificial
  VH of BCMA-98
EVQLVESGGGLVQPGGSLRLSCAASGFTFSNFDMAWVRQAPGKGLVWVSSITTGGGDTYYADSVKGRFTISRDNAKSTLYLQMDSLRSEDTAVYYCVRHGYYDGYHLFDYWGQGTLVTVSS

SEQ ID NO: 978 - protein, 107 aa, artificial
  VL of BCMA-98
DIQMTQSPSSLSASVGDRVTITCRANQGISNNLNWYQQKPGKAPKPLIYYTSNLQSGVPSRFSGSGSGTDYTLTISSLQPEDFATYYCQQFTSLPYTFGQGTKLEIK

SEQ ID NO: 979 - protein, 243 aa, artificial
  BCMA-98 scFv
EVQLVESGGGLVQPGGSLRLSCAASGFTFSNFDMAWVRQAPGKGLVWVSSITTGGGDTYYADSVKGRFTISRDNAKSTLYLQMDSLRSEDTAVYYCVRHGYYDGYHLFDYWGQGTLVTVSSGGGGSGGGGSGGGGSDIQMTQSPSSLSASVGDRVTITCRANQGISNNLNWYQQKPGKAPKPLIYYTSNLQSGVPSRFSGSGSGTDYTLTISSLQPEDFATYYCQQFTSLPYTFGQGTKLEIK

SEQ ID NO: 980 - protein, 498 aa, artificial
  BCMA-98 HL x CD3 HL bispecific molecule
EVQLVESGGGLVQPGGSLRLSCAASGFTFSNFDMAWVRQAPGKGLVWVSSITTGGGDTYYADSVKGRFTISRDNAKSTLYLQMDSLRSEDTAVYYCVRHGYYDGYHLFDYWGQGTLVTVSSGGGGSGGGGSGGGGSDIQMTQSPSSLSASVGDRVTITCRANQGISNNLNWYQQKPGKAPKPLIYYTSNLQSGVPSRFSGSGSGTDYTLTISSLQPEDFATYYCQQFTSLPYTFGQGTKLEIKSGGGGSEVQLVESGGGLVQPGGSLKLSCAASGFTFNKYAMNWVRQAPGKGLEWVARIRSKYNNYATYYADSVKDRFTISRDDSKNTAYLQMNNLKTEDTAVYYCVRHGNFGNSYISYWAYWGQGTLVTVSSGGGGSGGGGSGGGGSQTVVTQEPSLTVSPGGTVTLTCGSSTGAVTSGNYPNWVQQKPGQAPRGLIGGTKFLAPGTPARFSGSLLGGKAALTLSGVQPEDEAEYYCVLWYSNRWVFGGGTKLTVL

SEQ ID NO: 981 - protein, 5 aa, artificial
  VH CDR1 of BCMA-99
NFDMA

SEQ ID NO: 982 - protein, 17 aa, artificial
  VH CDR2 of BCMA-99
SITTGGGDTYYADSVKG

SEQ ID NO: 983 - protein, 12 aa, artificial
  VH CDR3 of BCMA-99
HGYYDGYHLFDY

SEQ ID NO: 984 - protein, 11 aa, artificial
  VL CDR1 of BCMA-99
RASQGISNNLN

SEQ ID NO: 985 - protein, 7 aa, artificial
  VL CDR2 of BCMA-99
YTSNLQS

SEQ ID NO: 986 - protein, 9 aa, artificial
  VL CDR3 of BCMA-99
QQFTSLPYT

SEQ ID NO: 987 - protein, 121 aa, artificial; identical to SEQ ID NO: 757
  VH of BCMA-99

SEQ ID NO: 988 - protein, 107 aa, artificial; identical to SEQ ID NO: 968
  VL of BCMA-99

SEQ ID NO: 989 - protein, 243 aa, artificial
  BCMA-99 scFv
EVQLVESGGGLVQPGGSLRLSCAASGFTFSNFDMAWVRQAPGKGLVWVSSITTGGGDTYYADSVKGRFTISRDNAKNTLYLQMDSLRSEDTAVYYCVRHGYYDGYHLFDYWGQGTLVTVSSGGGGSGGGGSGGGGSDIQMTQSPSSMSASVGDRVTITCRASQGISNNLNWYQQKPGKAPKSLIYYTSNLQSGVPSRFSGSGSGTDYTLTISSLQPEDFATYYCQQFTSLPYTFGQGTKLEIK

SEQ ID NO: 990 - protein, 498 aa, artificial
  BCMA-99 HL x CD3 HL bispecific molecule
EVQLVESGGGLVQPGGSLRLSCAASGFTFSNFDMAWVRQAPGKGLVWVSSITTGGGDTYYADSVKGRFTISRDNAKNTLYLQMDSLRSEDTAVYYCVRHGYYDGYHLFDYWGQGTLVTVSSGGGGSGGGGSGGGGSDIQMTQSPSSMSASVGDRVTITCRASQGISNNLNWYQQKPGKAPKSLIYYTSNLQSGVPSRFSGSGSGTDYTLTISSLQPEDFATYYCQQFTSLPYTFGQGTKLEIKSGGGGSEVQLVESGGGLVQPGGSLKLSCAASGFTFNKYAMNWVRQAPGKGLEWVARIRSKYNNYATYYADSVKDRFTISRDDSKNTAYLQMNNLKTEDTAVYYCVRHGNFGNSYISYWAYWGQGTLVTVSSGGGGSGGGGSGGGGSQTVVTQEPSLTVSPGGTVTLTCGSSTGAVTSGNYPNWVQQKPGQAPRGLIGGTKFLAPGTPARFSGSLLGGKAALTLSGVQPEDEAEYYCVLWYSNRWVFGGGTKLTVL

SEQ ID NO: 991 - protein, 5 aa, artificial
  VH CDR1 of BCMA-100
NFDMA

SEQ ID NO: 992 - protein, 17 aa, artificial
  VH CDR2 of BCMA-100
SITTGGGDTYYADSVKG

SEQ ID NO: 993 - protein, 12 aa, artificial
  VH CDR3 of BCMA-100
HGYYDGYHLFDY

SEQ ID NO: 994 - protein, 11 aa, artificial
  VL CDR1 of BCMA-100
RASQGISNNLN

SEQ ID NO: 995 - protein, 7 aa, artificial
  VL CDR2 of BCMA-100
YTSNLQS

SEQ ID NO: 996 - protein, 9 aa, artificial
  VL CDR3 of BCMA-100
QQFAHLPYT

SEQ ID NO: 997 - protein, 121 aa, artificial; identical to SEQ ID NO: 757
  VH of BCMA-100

SEQ ID NO: 998 - protein, 107 aa, artificial
  VL of BCMA-100
DIQMTQSPSSMSASVGDRVTITCRASQGISNNLNWYQQKPGKAPKSLIYYTSNLQSGVPSRFSGSGSGTDYTLTISSLQPEDFATYYCQQFAHLPYTFGQGTKLEIK

SEQ ID NO: 999 - protein, 243 aa, artificial
  BCMA-100 scFv
EVQLVESGGGLVQPGGSLRLSCAASGFTFSNFDMAWVRQAPGKGLVWVSSITTGGGDTYYADSVKGRFTISRDNAKNTLYLQMDSLRSEDTAVYYCVRHGYYDGYHLFDYWGQGTLVTVSSGGGGSGGGGSGGGGSDIQMTQSPSSMSASVGDRVTITCRASQGISNNLNWYQQKPGKAPKSLIYYTSNLQSGVPSRFSGSGSGTDYTLTISSLQPEDFATYYCQQFAHLPYTFGQGTKLEIK

SEQ ID NO: 1000 - protein, 498 aa, artificial
  BCMA-100 HL x CD3 HL bispecific molecule
EVQLVESGGGLVQPGGSLRLSCAASGFTFSNFDMAWVRQAPGKGLVWVSSITTGGGDTYYADSVKGRFTISRDNAKNTLYLQMDSLRSEDTAVYYCVRHGYYDGYHLFDYWGQGTLVTVSSGGGGSGGGGSGGGGSDIQMTQSPSSMSASVGDRVTITCRASQGISNNLNWYQQKPGKAPKSLIYYTSNLQSGVPSRFSGSGSGTDYTLTISSLQPEDFATYYCQQFAHLPYTFGQGTKLEIKSGGGGSEVQLVESGGGLVQPGGSLKLSCAASGFTFNKYAMNWVRQAPGKGLEWVARIRSKYNNYATYYADSVKDRFTISRDDSKNTAYLQMNNLKTEDTAVYYCVRHGNFGNSYISYWAYWGQGTLVTVSSGGGGSGGGGSGGGGSQTVVTQEPSLTVSPGGTVTLTCGSSTGAVTSGNYPNWVQQKPGQAPRGLIGGTKFLAPGTPARFSGSLLGGKAALTLSGVQPEDEAEYYCVLWYSNRWVFGGGTKLTVL

SEQ ID NO: 1001 - DNA, 555 bp, human
  misc (1)..(555): human BCMA
atgttgcagatggctgggcagtgctcccaaaatgaatattttgacagtttgttgcatgcttgcataccttgtcaacttcgatgttcttctaatactcctcctctaacatgtcagcgttattgtaatgcaagtgtgaccaattcagtgaaaggaacgaatgcgattctctggacctgtttgggactgagcttaataatttctttggcagttttcgtgctaatgtttttgctaaggaagataaactctgaaccattaaaggacgagtttaaaaacacaggatcaggtctcctgggcatggctaacattgacctggaaaagagcaggactggtgatgaaattattcttccgagaggcctcgagtacacggtggaagaatgcacctgtgaagactgcatcaagagcaaaccgaaggtcgactctgaccattgctttccactcccagctatggaggaaggcgcaaccattcttgtcaccacgaaaacgaatgactattgcaagagcctgccagctgctttgagtgctacggagatagagaaatcaatttctgctaggtaa

SEQ ID NO: 1002 - protein, 184 aa, human
  misc (1)..(184): human BCMA
MLQMAGQCSQNEYFDSLLHACIPCQLRCSSNTPPLTCQRYCNASVTNSVKGTNAILWTCLGLSLIISLAVFVLMFLLRKINSEPLKDEFKNTGSGLLGMANIDLEKSRTGDEIILPRGLEYTVEECTCEDCIKSKPKVDSDHCFPLPAMEEGATILVTTKTNDYCKSLPAALSATEIEKSISAR

SEQ ID NO: 1003 - DNA, 558 bp, mouse
  misc (1)..(558): mouse BCMA
atggcgcaacagtgtttccacagtgaatattttgacagtctgctgcatgcttgcaaaccgtgtcacttgcgatgttccaaccctcctgcaacctgtcagccttactgtgatccaagcgtgaccagttcagtgaaagggacgtacacggtgctctggatcttcttggggctgaccttggtcctctctttggcacttttcacaatctcattcttgctgaggaagatgaaccccgaggccctgaaggacgagcctcaaagcccaggtcagcttgacggatcggctcagctggacaaggccgacaccgagctgactaggatcagggctggtgacgacaggatctttccccgaagcctggagtatacagtggaagagtgcacctgtgaggactgtgtcaagagcaaacccaagggggattctgaccatttcttcccgcttccagccatggaggagggggcaaccattcttgtcaccacaaaaacgggtgactacggcaagtcaagtgtgccaactgctttgcaaagtgtcatggggatggagaagccaactcacactagataa

SEQ ID NO: 1004 - protein, 185 aa, mouse
  misc (1)..(185): mouse BCMA
MAQQCFHSEYFDSLLHACKPCHLRCSNPPATCQPYCDPSVTSSVKGTYTVLWIFLGLTLVLSLALFTISFLLRKMNPEALKDEPQSPGQLDGSAQLDKADTELTRIRAGDDRIFPRSLEYTVEECTCEDCVKSKPKGDSDHFFPLPAMEEGATILVTTKTGDYGKSSVPTALQSVMGMEKPTHTR

SEQ ID NO: 1005 - DNA, 552 bp, rhesus monkey
  misc (1)..(552): rhesus monkey BCMA
atgttgcagatggctcggcagtgctcccaaaatgaatattttgacagtttgttgcatgattgcaaaccttgtcaacttcgatgttctagtactcctcctctaacatgtcagcgttattgcaatgcaagtatgaccaattcagtgaaaggaatgaatgcgattctctggacctgtttgggactgagcttgataatttctttggcagttttcgtgctaacgtttttgctaaggaagatgagctctgaaccattaaaggatgagtttaaaaacacaggatcaggtctcctgggcatggctaacattgacctggaaaagggcaggactggtgatgaaattgttcttccaagaggcctggagtacacggtggaagaatgcacctgtgaagactgcatcaagaataaaccaaaggttgattctgaccattgctttccactcccagccatggaggaaggcgcaaccattctcgtcaccacgaaaacgaatgactattgcaatagcctgtcagctgctttgagtgttacggagatagagaaatcaatttctgctaggtaa

SEQ ID NO: 1006 - protein, 183 aa, rhesus monkey
  misc (1)..(183): rhesus monkey BCMA
MLQMARQCSQNEYFDSLLHDCKPCQLRCSSTPPLTCQRYCNASMTNSVKGMNAILWTCLGLSLIISLAVFVLTFLLRKMSSEPLKDEFKNTGSGLLGMANIDLEKGRTGDEIVLPRGLEYTVEECTCEDCIKNKPKVDSDHCFPLPAMEEGATILVTTKTNDYCNSLSAALSVTEIEKSISAR

SEQ ID NO: 1007 - protein, 54 aa, human
  misc (1)..(54): human BCMA
MLQMAGQCSQNEYFDSLLHACIPCQLRCSSNTPPLTCQRYCNASVTNSVKGTNA

SEQ ID NO: 1008 - protein, 49 aa, mouse
  misc (1)..(49): mouse BCMA
MAQQCFHSEYFDSLLHACKPCHLRCSNPPATCQPYCDPSVTSSVKGTYT

SEQ ID NO: 1009 - protein, 51 aa, artificial
  human/mouse BCMA chimera
MAQQCSQNEYFDSLLHACIPCQLRCSSNTPPLTCQRYCNASVTNSVKGTNA

SEQ ID NO: 1010 - protein, 54 aa, artificial
  human/mouse BCMA chimera
MLQMAGQCFHSEYFDSLLHACIPCQLRCSSNTPPLTCQRYCNASVTNSVKGTNA

SEQ ID NO: 1011 - protein, 52 aa, artificial
  human/mouse BCMA chimera
MLQMAGQCSQNEYFDSLLHACIPCHLRCSNPPATCQPYCNASVTNSVKGTNA

SEQ ID NO: 1012 - protein, 54 aa, artificial
  human/mouse BCMA chimera
MLQMAGQCSQNEYFDSLLHACIPCQLRCSSNTPPLTCQRYCDPSVTSSVKGTYT

SEQ ID NO: 1013 - protein, 54 aa, artificial; identical to SEQ ID NO: 1012
  human/mouse BCMA chimera

SEQ ID NO: 1014 - protein, 54 aa, artificial
  human/mouse BCMA chimera
MLQMAGQCSQNEYFDSLLHACIPCHLRCSSNTPPLTCQRYCNASVTNSVKGTNA

SEQ ID NO: 1015 - protein, 54 aa, artificial
  human/mouse BCMA chimera
MLQMAGQCSQNEYFDSLLHACIPCQLRCSSNTPPLTCQPYCNASVTNSVKGTNA

SEQ ID NO: 1016 - protein, 18 aa, human
  misc (1)..(18): human BCMA
CQLRCSSNTPPLTCQRYC

SEQ ID NO: 1017 - protein, 17 aa, rhesus monkey
  misc (1)..(17): rhesus monkey BCMA
CQLRCSSTPPLTCQRYC

SEQ ID NO: 1018 - protein, 7 aa, human
  misc (1)..(7): human BCMA
MLQMAGQ

SEQ ID NO: 1019 - protein, 13 aa, human
  misc (1)..(13): human BCMA
NASVTNSVKGTNA

SEQ ID NO: 1020 - protein, 7 aa, rhesus monkey
  misc (1)..(7): rhesus monkey BCMA
MLQMARQ

SEQ ID NO: 1021 - protein, 13 aa, rhesus monkey
  misc (1)..(13): rhesus monkey BCMA
NASMTNSVKGMNA

SEQ ID NO: 1022 - protein, 10 aa, artificial
  VH CDR1 of BCMA-101
GFTFSNYDMA

SEQ ID NO: 1023 - protein, 17 aa, artificial
  VH CDR2 of BCMA-101
SIITSGGDNYYRDSVKG

SEQ ID NO: 1024 - protein, 12 aa, artificial
  VH CDR3 of BCMA-101
HDYYDGSYGFAY

SEQ ID NO: 1025 - protein, 11 aa, artificial
  VL CDR1 of BCMA-101
KASQSVGINVD

SEQ ID NO: 1026 - protein, 7 aa, artificial
  VL CDR2 of BCMA-101
GASNRHT

SEQ ID NO: 1027 - protein, 9 aa, artificial
  VL CDR3 of BCMA-101
LQYGSIPFT

SEQ ID NO: 1028 - protein, 121 aa, artificial
  VH of BCMA-101
EVQLVESGGGLVQPGRSLKLSCAASGFTFSNYDMAWVRQAPTKGLEWVASIITSGGDNYYRDSVKGRFTVSRDNAKSTLYLQMDSLRSEDTATYYCVRHDYYDGSYGFAYWGQGTLVTVSS

SEQ ID NO: 1029 - protein, 107 aa, artificial
  VL of BCMA-101
ETVMTQSPTSMSTSIGERVTLNCKASQSVGINVDWYQQTPGQSPKLLIYGASNRHTGVPDRFTGSGFGRDFTLTISNVEAEDLAVYYCLQYGSIPFTFGSGTKLELK

SEQ ID NO: 1030 - protein, 244 aa, artificial
  BCMA-101 scFv
EVQLVESGGGLVQPGRSLKLSCAASGFTFSNYDMAWVRQAPTKGLEWVASIITSGGDNYYRDSVKGRFTVSRDNAKSTLYLQMDSLRSEDTATYYCVRHDYYDGSYGFAYWGQGTLVTVSSGGGGSGGGGGSGGGGSETVMTQSPTSMSTSIGERVTLNCKASQSVGINVDWYQQTPGQSPKLLIYGASNRHTGVPDRFTGSGFGRDFTLTISNVEAEDLAVYYCLQYGSIPFTFGSGTKLELK

SEQ ID NO: 1031 - protein, 10 aa, artificial
  VH CDR1 of BCMA-102
GYTFTNHIIH

SEQ ID NO: 1032 - protein, 17 aa, artificial
  VH CDR2 of BCMA-102
YINPYNDDTEYNEKFKG

SEQ ID NO: 1033 - protein, 12 aa, artificial
  VH CDR3 of BCMA-102
DGYYRDMDVMDY

SEQ ID NO: 1034 - protein, 11 aa, artificial
  VL CDR1 of BCMA-102
RASQDISNYLN

SEQ ID NO: 1035 - protein, 7 aa, artificial
  VL CDR2 of BCMA-102
YTSRLHS

SEQ ID NO: 1036 - protein, 9 aa, artificial
  VL CDR3 of BCMA-102
QQGNTLPWT

SEQ ID NO: 1037 - protein, 122 aa, artificial
  VH of BCMA-102
EVQLVEQSGPELVKPGASVKMSCKASGYTFTNHIIHWVKQKPGQGLEWIGYINPYNDDTEYNEKFKGKATLTSDKSSTTAYMELSSLTSEDSAVYYCARDGYYRDMDVMDYWGQGTTVTVSS

SEQ ID NO: 1038 - protein, 107 aa, artificial
  VL of BCMA-102
ELVMTQTPSSLSASLGDRVTISCRASQDISNYLNWYQQKPDGTVKLLIYYTSRLHSGVPSRFSGSGSGTDYSLTISNLEQEDIATYFCQQGNTLPWTFGGGTKLEIK

SEQ ID NO: 1039 - protein, 244 aa, artificial
  BCMA-102 scFv
EVQLVEQSGPELVKPGASVKMSCKASGYTFTNHIIHWVKQKPGQGLEWIGYINPYNDDTEYNEKFKGKATLTSDKSSTTAYMELSSLTSEDSAVYYCARDGYYRDMDVMDYWGQGTTVTVSSGGGGSGGGGSGGGGSELVMTQTPSSLSASLGDRVTISCRASQDISNYLNWYQQKPDGTVKLLIYYTSRLHSGVPSRFSGSGSGTDYSLTISNLEQEDIATYFCQQGNTLPWTFGGGTKLEIK

SEQ ID NO: 1040 - protein, 10 aa, artificial
  VH CDR1 of BCMA-103
GFTFSNYDMA

SEQ ID NO: 1041 - protein, 17 aa, artificial
  VH CDR2 of BCMA-103
SISTRGDITSYRDSVKG

SEQ ID NO: 1042 - protein, 12 aa, artificial
  VH CDR3 of BCMA-103
QDYYTDYMGFAY

SEQ ID NO: 1043 - protein, 11 aa, artificial
  VL CDR1 of BCMA-103
RASEDIYNGLA

SEQ ID NO: 1044 - protein, 7 aa, artificial
  VL CDR2 of BCMA-103
GASSLQD

SEQ ID NO: 1045 - protein, 9 aa, artificial
  VL CDR3 of BCMA-103
QQSYKYPLT

SEQ ID NO: 1046 - protein, 122 aa, artificial
  VH of BCMA-103
EVQLVEESGGGLLQPGRSLKLSCAASGFTFSNYDMAWVRQAPTKGLEWVASISTRGDITSYRDSVKGRFTISRDNAKSTLYLQMDSLRSEDTATYYCARQDYYTDYMGFAYWGQGTLVTVSS

SEQ ID NO: 1047 - protein, 107 aa, artificial
  VL of BCMA-103
ELVMTQSPASLSASLGETVTIECRASEDIYNGLAWYQQKPGKSPQLLIYGASSLQDGVPSRFSGSGSGTQYSLKISGMQPEDEANYFCQQSYKYPLTFGSGTKLELK

SEQ ID NO: 1048 - protein, 244 aa, artificial
  BCMA-103 scFv
EVQLVEESGGGLLQPGRSLKLSCAASGFTFSNYDMAWVRQAPTKGLEWVASISTRGDITSYRDSVKGRFTISRDNAKSTLYLQMDSLRSEDTATYYCARQDYYTDYMGFAYWGQGTLVTVSSGGGGSGGGGSGGGELVMTQSPASLSASLGETVTIECRASEDIYNGLAWYQQKPGKSPQLLIYGASSLQDGVPSRFSGSGSGTQYSLKISGMQPEDEANYFCQQSYKYPLTFGSGTKLELKGS

SEQ ID NO: 1049 - protein, 10 aa, artificial
  VH CDR1 of BCMA-104
GFTFSNFDMA

SEQ ID NO: 1050 - protein, 17 aa, artificial
  VH CDR2 of BCMA-104
SITTGGGDTYYRDSVKG

SEQ ID NO: 1051 - protein, 12 aa, artificial
  VH CDR3 of BCMA-104
HGYYDGYHLFDY

SEQ ID NO: 1052 - protein, 10 aa, artificial
  VL CDR1 of BCMA-104
RASQGISNYL

SEQ ID NO: 1053 - protein, 7 aa, artificial
  VL CDR2 of BCMA-104
YTSNLQS

SEQ ID NO: 1054 - protein, 9 aa, artificial
  VL CDR3 of BCMA-104
QQYDISSYT

SEQ ID NO: 1055 - protein, 122 aa, artificial
  VH of BCMA-104
EVQLVEESGGGLVQPGRSLKLSCAASGFTFSNFDMAWVRQAPTRGLEWVASITTGGGDTYYRDSVKGRFTISRDNAKSTLYLQMDSLRSEDTATYYCVRHGYYDGYHLFDYWGQGASVTVSS

SEQ ID NO: 1056 - protein, 107 aa, artificial
  VL of BCMA-104
ELVMTQTPSSMPASLGERVTISCRASQGISNYLNWYQQKPDGTIKPLIYYTSNLQSGVPSRFSGSGSGTDYSLTINSLEPEDFAVYYCQQYDISSYTFGAGTKLEIK

SEQ ID NO: 1057 - protein, 244 aa, artificial
  BCMA-104 scFv
EVQLVEESGGGLVQPGRSLKLSCAASGFTFSNFDMAWVRQAPTRGLEWVASITTGGGDTYYRDSVKGRFTISRDNAKSTLYLQMDSLRSEDTATYYCVRHGYYDGYHLFDYWGQGASVTVSSGGGGSGGGGSGGGGSELVMTQTPSSMPASLGERVTISCRASQGISNYLNWYQQKPDGTIKPLIYYTSNLQSGVPSRFSGSGSGTDYSLTINSLEPEDFAVYYCQQYDISSYTFGAGTKLEIK

SEQ ID NO: 1058 - protein, 10 aa, artificial
  VH CDR1 of BCMA-105
GFTFSNFDMA

SEQ ID NO: 1059 - protein, 17 aa, artificial
  VH CDR2 of BCMA-105
SITTGGGDTYYRDSVKG

SEQ ID NO: 1060 - protein, 12 aa, artificial
  VH CDR3 of BCMA-105
HGYYDGYHLFDY

SEQ ID NO: 1061 - protein, 11 aa, artificial
  VL CDR1 of BCMA-105
RASQGISNHLN

SEQ ID NO: 1062 - protein, 7 aa, artificial
  VL CDR2 of BCMA-105
YTSNLQS

SEQ ID NO: 1063 - protein, 9 aa, artificial
  VL CDR3 of BCMA-105
QQYDSFPLT

SEQ ID NO: 1064 - protein, 122 aa, artificial
  VH of BCMA-105
EVQLVEESGGGLVQPGRSLKLSCAASGFTFSNFDMAWVRQAPTRGLEWVASITTGGGDTYYRDSVKGRFTISRDNAKSTLYLQMDSLRSEDTATYYCVRHGYYDGYHLFDYWGQGTLVTVSS

SEQ ID NO: 1065 - protein, 107 aa, artificial
  VL of BCMA-105
ELVMTQTPSSMPASLGERVTISCRASQGISNHLNWYQQKPDGTIKPLIYYTSNLQSGVPSRFSGSGSGTDYSLTISSLEPEDFAMYYCQQYDSFPLTFGSGTKLEIK

SEQ ID NO: 1066 - protein, 244 aa, artificial
  BCMA-105 scFv
EVQLVEESGGGLVQPGRSLKLSCAASGFTFSNFDMAWVRQAPTRGLEWVASITTGGGDTYYRDSVKGRFTISRDNAKSTLYLQMDSLRSEDTATYYCVRHGYYDGYHLFDYWGQGTLVTVSSGGGGSGGGGSGGGGSELVMTQTPSSMPASLGERVTISCRASQGISNHLNWYQQKPDGTIKPLIYYTSNLQSGVPSRFSGSGSGTDYSLTISSLEPEDFAMYYCQQYDSFPLTFGSGTKLEIK

SEQ ID NO: 1067 - protein, 10 aa, artificial
  VH CDR1 of BCMA-106
GFTFSNFDMA

SEQ ID NO: 1068 - protein, 17 aa, artificial
  VH CDR2 of BCMA-106
SITTGGGDTYYRDSVKG

SEQ ID NO: 1069 - protein, 12 aa, artificial
  VH CDR3 of BCMA-106
HGYYDGYHLFDY

SEQ ID NO: 1070 - protein, 11 aa, artificial
  VL CDR1 of BCMA-106
RASQGISNNLN

SEQ ID NO: 1071 - protein, 7 aa, artificial
  VL CDR2 of BCMA-106
YTSNLQS

SEQ ID NO: 1072 - protein, 9 aa, artificial
  VL CDR3 of BCMA-106
QQFDTSPYT

SEQ ID NO: 1073 - protein, 122 aa, artificial
  VH of BCMA-106
EVQLVEESGGGLVQPGRSLKLSCAASGFTFSNFDMAWVRQAPTRGLEWVASITTGGGDTYYRDSVKGRFTISRDNAKSTLYLQMDSLRSEDTATYYCVRHGYYDGYHLFDYWGQGVMVTVSS

SEQ ID NO: 1074 - protein, 107 aa, artificial
  VL of BCMA-106
ELVMTQTPSSMPASLGERVTISCRASQGISNNLNWYQQKPDGTIKPLIYYTSNLQSGVPSRFSGSGSGTDYSLTISSLEPEDFAMYYCQQFDTSPYTFGAGTKLEIK

SEQ ID NO: 1075 - protein, 244 aa, artificial
  BCMA-106 scFv
EVQLVEESGGGLVQPGRSLKLSCAASGFTFSNFDMAWVRQAPTRGLEWVASITTGGGDTYYRDSVKGRFTISRDNAKSTLYLQMDSLRSEDTATYYCVRHGYYDGYHLFDYWGQGVMVTVSSGGGGSGGGGSGGGGSELVMTQTPSSMPASLGERVTISCRASQGISNNLNWYQQKPDGTIKPLIYYTSNLQSGVPSRFSGSGSGTDYSLTISSLEPEDFAMYYCQQFDTSPYTFGAGTKLEIK

SEQ ID NO: 1076 - protein, 10 aa, artificial
  VH CDR1 of BCMA-107
GYSFPDYYIN

SEQ ID NO: 1077 - protein, 13 aa, artificial
  VH CDR2 of BCMA-107
WIYFASGNSEYNE

SEQ ID NO: 1078 - protein, 10 aa, artificial
  VH CDR3 of BCMA-107
LYDYDWYFDV

SEQ ID NO: 1079 - protein, 16 aa, artificial
  VL CDR1 of BCMA-107
RSSQSLVHSNGNTYLH

SEQ ID NO: 1080 - protein, 7 aa, artificial
  VL CDR2 of BCMA-107
KVSNRFS

SEQ ID NO: 1081 - protein, 9 aa, artificial
  VL CDR3 of BCMA-107
SQSTHVPYT

SEQ ID NO: 1082 - protein, 120 aa, artificial
  VH of BCMA-107
EVQLVEQSGPELVKPGASVKISCKVSGYSFPDYYINWVKQRPGQGLEWIGWIYFASGNSEYNERFTGKATLTVDTSSNTAYMQLSSLTSEDTAVYFCASLYDYDWYFDVWGQGTTVTVSS

SEQ ID NO: 1083 - protein, 112 aa, artificial
  VL of BCMA-107
ELVMTQTPLSLPVSLGDQASISCRSSQSLVHSNGNTYLHWYLQKPGQSPKLLIYKVSNRFSGVPDRFSGSGSGADFTLKISRVEAEDLGVYFCSQSTHVPYTFGGGTKLEIK

SEQ ID NO: 1084 - protein, 247 aa, artificial
  BCMA-107 scFv
EVQLVEQSGPELVKPGASVKISCKVSGYSFPDYYINWVKQRPGQGLEWIGWIYFASGNSEYNERFTGKATLTVDTSSNTAYMQLSSLTSEDTAVYFCASLYDYDWYFDVWGQGTTVTVSSGGGGSGGGGSGGGGSELVMTQTPLSLPVSLGDQASISCRSSQSLVHSNGNTYLHWYLQKPGQSPKLLIYKVSNRFSGVPDRFSGSGSGADFTLKISRVEAEDLGVYFCSQSTHVPYTFGGGTKLEIK

SEQ ID NO: 1085 - protein, 10 aa, artificial
  VH CDR1 of BCMA-108
GYSFPDYYIN

SEQ ID NO: 1086 - protein, 13 aa, artificial
  VH CDR2 of BCMA-108
WIYFASGNSEYNE

SEQ ID NO: 1087 - protein, 10 aa, artificial
  VH CDR3 of BCMA-108
LYDYDWYFDV

SEQ ID NO: 1088 - protein, 16 aa, artificial
  VL CDR1 of BCMA-108
RSSQSLVHSNGNTYLH

SEQ ID NO: 1089 - protein, 7 aa, artificial
  VL CDR2 of BCMA-108
KVSNRFS

SEQ ID NO: 1090 - protein, 9 aa, artificial
  VL CDR3 of BCMA-108
FQGSHVPWT

SEQ ID NO: 1091 - protein, 120 aa, artificial
  VH of BCMA-108
EVQLVEQSGPQLVKPGASVKISCKVSGYSFPDYYINWVKQRPGQGLEWIGWIYFASGNSEYNERFTGKATLTVDTSSNTAYMQLSSLTSEDTAVYFCASLYDYDWYFDVWGQGTTVTVSS

SEQ ID NO: 1092 - protein, 112 aa, artificial
  VL of BCMA-108
ELVMTQTPLSLPVSLGDQASISCRSSQSLVHSNGNTYLHWYLQKPGQSPKLLIYKVSNRFSGVPGRFSGSGSGTDFTLKINRVEAEDLGVYYCFQGSHVPWTFGGGTKLEIK

SEQ ID NO: 1093 - protein, 247 aa, artificial
  BCMA-108 scFv
EVQLVEQSGPQLVKPGASVKISCKVSGYSFPDYYINWVKQRPGQGLEWIGWIYFASGNSEYNERFTGKATLTVDTSSNTAYMQLSSLTSEDTAVYFCASLYDYDWYFDVWGQGTTVTVSSGGGGSGGGGSGGGGSELVMTQTPLSLPVSLGDQASISCRSSQSLVHSNGNTYLHWYLQKPGQSPKLLIYKVSNRFSGVPGRFSGSGSGTDFTLKINRVEAEDLGVYYCFQGSHVPWTFGGGTKLEIK

What is claimed is:

1. A binding molecule which is at least bispecific comprising a first and a second binding domain, wherein
(a) the first binding domain is capable of binding to epitope cluster 3 of BCMA (CQLRCSSNTPPLTCQRYC); and
(b) the second binding domain is capable of binding to the T cell CD3 receptor complex; and
wherein epitope cluster 3 of BCMA corresponds to amino acid residues 24 to 41 of the sequence as depicted in SEQ ID NO: 1002.

2. The binding molecule according to claim 1, wherein the first binding domain is further capable of binding to epitope cluster 3 of macaque BCMA (CQLRCSSTPPLTCQRYC).

3. The binding molecule according to claim 1 wherein the second binding domain is capable of binding to CD3 epsilon.

4. The binding molecule according to claim 1, wherein the second binding domain is capable of binding to human CD3 and to macaque CD3.

5. The binding molecule according to claim 1, wherein the first and/or the second binding domain are derived from an antibody.

6. The binding molecule according to claim 5, which is selected from the group consisting of (scFv)₂, (single domain mAb)₂, scFv-single domain mAb, diabodies and oligomers thereof.

7. The binding molecule according to claim 1, wherein the first binding domain comprises a VH region comprising CDR-H1, CDR-H2 and CDR-H3 and a VL region comprising CDR-L1, CDR-L2 and CDR-L3 selected from the group consisting of:
(1) CDR-H1 as depicted in SEQ ID NO: 1, CDR-H2 as depicted in SEQ ID NO: 2, CDR-H3 as depicted in SEQ ID NO: 3, CDR-L1 as depicted in SEQ ID NO: 4, CDR-L2 as depicted in SEQ ID NO: 5 and CDR-L3 as depicted in SEQ ID NO: 6;
(2) CDR-H1 as depicted in SEQ ID NO: 11, CDR-H2 as depicted in SEQ ID NO: 12, CDR-H3 as depicted in SEQ ID NO: 13, CDR-L1 as depicted in SEQ ID NO: 14, CDR-L2 as depicted in SEQ ID NO: 15 and CDR-L3 as depicted in SEQ ID NO: 16;
(3) CDR-H1 as depicted in SEQ ID NO: 21, CDR-H2 as depicted in SEQ ID NO: 22, CDR-H3 as depicted in SEQ ID NO: 23, CDR-L1 as depicted in SEQ ID NO: 24, CDR-L2 as depicted in SEQ ID NO: 25 and CDR-L3 as depicted in SEQ ID NO: 26;
(4) CDR-H1 as depicted in SEQ ID NO: 31, CDR-H2 as depicted in SEQ ID NO: 32, CDR-H3 as depicted in SEQ ID NO: 33, CDR-L1 as depicted in SEQ ID NO: 34, CDR-L2 as depicted in SEQ ID NO: 35 and CDR-L3 as depicted in SEQ ID NO: 36;
(5) CDR-H1 as depicted in SEQ ID NO: 41, CDR-H2 as depicted in SEQ ID NO: 42, CDR-H3 as depicted in SEQ ID NO: 43, CDR-L1 as depicted in SEQ ID NO: 44, CDR-L2 as depicted in SEQ ID NO: 45 and CDR-L3 as depicted in SEQ ID NO: 46;
(6) CDR-H1 as depicted in SEQ ID NO: 51, CDR-H2 as depicted in SEQ ID NO: 52, CDR-H3 as depicted in SEQ ID NO: 53, CDR-L1 as depicted in SEQ ID NO: 54, CDR-L2 as depicted in SEQ ID NO: 55 and CDR-L3 as depicted in SEQ ID NO: 56;
(7) CDR-H1 as depicted in SEQ ID NO: 61, CDR-H2 as depicted in SEQ ID NO: 62, CDR-H3 as depicted in SEQ ID NO: 63, CDR-L1 as depicted in SEQ ID NO: 64, CDR-L2 as depicted in SEQ ID NO: 65 and CDR-L3 as depicted in SEQ ID NO: 66;
(8) CDR-H1 as depicted in SEQ ID NO: 71, CDR-H2 as depicted in SEQ ID NO: 72, CDR-H3 as depicted in SEQ ID NO: 73, CDR-L1 as depicted in SEQ ID NO: 74, CDR-L2 as depicted in SEQ ID NO: 75 and CDR-L3 as depicted in SEQ ID NO: 76;
(9) CDR-H1 as depicted in SEQ ID NO: 161, CDR-H2 as depicted in SEQ ID NO: 162, CDR-H3 as depicted in SEQ ID NO: 163, CDR-L1 as depicted in SEQ ID NO: 164, CDR-L2 as depicted in SEQ ID NO: 165 and CDR-L3 as depicted in SEQ ID NO: 166;
(10) CDR-H1 as depicted in SEQ ID NO: 171, CDR-H2 as depicted in SEQ ID NO: 172, CDR-H3 as depicted in SEQ ID NO: 173, CDR-L1 as depicted in SEQ ID NO: 174, CDR-L2 as depicted in SEQ ID NO: 175 and CDR-L3 as depicted in SEQ ID NO: 176;
(11) CDR-H1 as depicted in SEQ ID NO: 181, CDR-H2 as depicted in SEQ ID NO: 182, CDR-H3 as depicted in SEQ ID NO: 183, CDR-L1 as depicted in SEQ ID NO: 184, CDR-L2 as depicted in SEQ ID NO: 185 and CDR-L3 as depicted in SEQ ID NO: 186;
(12) CDR-H1 as depicted in SEQ ID NO: 191, CDR-H2 as depicted in SEQ ID NO: 192, CDR-H3 as depicted in SEQ ID NO: 193, CDR-L1 as depicted in SEQ ID NO: 194, CDR-L2 as depicted in SEQ ID NO: 195 and CDR-L3 as depicted in SEQ ID NO: 196;
(13) CDR-H1 as depicted in SEQ ID NO: 201, CDR-H2 as depicted in SEQ ID NO: 202, CDR-H3 as depicted in SEQ ID NO: 203, CDR-L1 as depicted in SEQ ID NO: 204, CDR-L2 as depicted in SEQ ID NO: 205 and CDR-L3 as depicted in SEQ ID NO: 206;
(14) CDR-H1 as depicted in SEQ ID NO: 211, CDR-H2 as depicted in SEQ ID NO: 212, CDR-H3 as depicted in SEQ ID NO: 213, CDR-L1 as depicted in SEQ ID NO:214, CDR-L2 as depicted in SEQ ID NO: 215 and CDR-L3 as depicted in SEQ ID NO: 216;
(15) CDR-H1 as depicted in SEQ ID NO: 221, CDR-H2 as depicted in SEQ ID NO: 222, CDR-H3 as depicted in SEQ ID NO: 223, CDR-L1 as depicted in SEQ ID NO: 224, CDR-L2 as depicted in SEQ ID NO: 225 and CDR-L3 as depicted in SEQ ID NO: 226;
(16) CDR-H1 as depicted in SEQ ID NO: 311, CDR-H2 as depicted in SEQ ID NO: 312, CDR-H3 as depicted in SEQ ID NO: 313, CDR-L1 as depicted in SEQ ID NO: 314, CDR-L2 as depicted in SEQ ID NO: 315 and CDR-L3 as depicted in SEQ ID NO: 316;
(17) CDR-H1 as depicted in SEQ ID NO: 321, CDR-H2 as depicted in SEQ ID NO: 322, CDR-H3 as depicted in SEQ ID NO: 323, CDR-L1 as depicted in SEQ ID NO: 324, CDR-L2 as depicted in SEQ ID NO: 325 and CDR-L3 as depicted in SEQ ID NO: 326;
(18) CDR-H1 as depicted in SEQ ID NO: 331, CDR-H2 as depicted in SEQ ID NO: 332, CDR-H3 as depicted in SEQ ID NO: 333, CDR-L1 as depicted in SEQ ID NO: 334, CDR-L2 as depicted in SEQ ID NO: 335 and CDR-L3 as depicted in SEQ ID NO: 336;
(19) CDR-H1 as depicted in SEQ ID NO: 341, CDR-H2 as depicted in SEQ ID NO: 342, CDR-H3 as depicted in SEQ ID NO: 343, CDR-L1 as depicted in SEQ ID NO: 344, CDR-L2 as depicted in SEQ ID NO: 345 and CDR-L3 as depicted in SEQ ID NO: 346;
(20) CDR-H1 as depicted in SEQ ID NO: 351, CDR-H2 as depicted in SEQ ID NO: 352, CDR-H3 as depicted in SEQ ID NO: 353, CDR-L1 as depicted in SEQ ID NO: 354, CDR-L2 as depicted in SEQ ID NO: 355 and CDR-L3 as depicted in SEQ ID NO: 356;
(21) CDR-H1 as depicted in SEQ ID NO: 361, CDR-H2 as depicted in SEQ ID NO: 362, CDR-H3 as depicted in SEQ ID NO: 363, CDR-L1 as depicted in SEQ ID NO: 364, CDR-L2 as depicted in SEQ ID NO: 365 and CDR-L3 as depicted in SEQ ID NO: 366;
(22) CDR-H1 as depicted in SEQ ID NO: 371, CDR-H2 as depicted in SEQ ID NO: 372, CDR-H3 as depicted in SEQ ID NO: 373, CDR-L1 as depicted in SEQ ID NO: 374, CDR-L2 as depicted in SEQ ID NO: 375 and CDR-L3 as depicted in SEQ ID NO: 376;
(23) CDR-H1 as depicted in SEQ ID NO: 381, CDR-H2 as depicted in SEQ ID NO: 382, CDR-H3 as depicted in SEQ ID NO: 383, CDR-L1 as depicted in SEQ ID NO: 384, CDR-L2 as depicted in SEQ ID NO: 385 and CDR-L3 as depicted in SEQ ID NO: 386;
(24) CDR-H1 as depicted in SEQ ID NO: 581, CDR-H2 as depicted in SEQ ID NO: 582, CDR-H3 as depicted in SEQ ID NO: 583, CDR-L1 as depicted in SEQ ID NO: 584, CDR-L2 as depicted in SEQ ID NO: 585 and CDR-L3 as depicted in SEQ ID NO: 586;
(25) CDR-H1 as depicted in SEQ ID NO: 591, CDR-H2 as depicted in SEQ ID NO: 592, CDR-H3 as depicted in SEQ ID NO: 593, CDR-L1 as depicted in SEQ ID NO: 594, CDR-L2 as depicted in SEQ ID NO: 595 and CDR-L3 as depicted in SEQ ID NO: 596;
(26) CDR-H1 as depicted in SEQ ID NO: 601, CDR-H2 as depicted in SEQ ID NO: 602, CDR-H3 as depicted in SEQ ID NO: 603, CDR-L1 as depicted in SEQ ID NO: 604, CDR-L2 as depicted in SEQ ID NO: 605 and CDR-L3 as depicted in SEQ ID NO: 606;
(27) CDR-H1 as depicted in SEQ ID NO: 611, CDR-H2 as depicted in SEQ ID NO: 612, CDR-H3 as depicted in SEQ ID NO: 613, CDR-L1 as depicted in SEQ ID NO: 614, CDR-L2 as depicted in SEQ ID NO: 615 and CDR-L3 as depicted in SEQ ID NO: 616;
(28) CDR-H1 as depicted in SEQ ID NO: 621, CDR-H2 as depicted in SEQ ID NO: 622, CDR-H3 as depicted in SEQ ID NO: 623, CDR-L1 as depicted in SEQ ID NO: 624, CDR-L2 as depicted in SEQ ID NO: 625 and CDR-L3 as depicted in SEQ ID NO: 626;
(29) CDR-H1 as depicted in SEQ ID NO: 631, CDR-H2 as depicted in SEQ ID NO: 632, CDR-H3 as depicted in SEQ ID NO: 633, CDR-L1 as depicted in SEQ ID NO: 634, CDR-L2 as depicted in SEQ ID NO: 635 and CDR-L3 as depicted in SEQ ID NO: 636;
(30) CDR-H1 as depicted in SEQ ID NO: 641, CDR-H2 as depicted in SEQ ID NO: 642, CDR-H3 as depicted in SEQ ID NO: 643, CDR-L1 as depicted in SEQ ID NO: 644, CDR-L2 as depicted in SEQ ID NO: 645 and CDR-L3 as depicted in SEQ ID NO: 646;
(31) CDR-H1 as depicted in SEQ ID NO: 651, CDR-H2 as depicted in SEQ ID NO: 652, CDR-H3 as depicted in SEQ ID NO: 653, CDR-L1 as depicted in SEQ ID NO: 654, CDR-L2 as depicted in SEQ ID NO: 655 and CDR-L3 as depicted in SEQ ID NO: 656;
(32) CDR-H1 as depicted in SEQ ID NO: 661, CDR-H2 as depicted in SEQ ID NO: 662, CDR-H3 as depicted in SEQ ID NO: 663, CDR-L1 as depicted in SEQ ID NO: 664, CDR-L2 as depicted in SEQ ID NO: 665 and CDR-L3 as depicted in SEQ ID NO: 666;
(33) CDR-H1 as depicted in SEQ ID NO: 671, CDR-H2 as depicted in SEQ ID NO: 672, CDR-H3 as depicted in SEQ ID NO: 673, CDR-L1 as depicted in SEQ ID NO: 674, CDR-L2 as depicted in SEQ ID NO: 675 and CDR-L3 as depicted in SEQ ID NO: 676;
(34) CDR-H1 as depicted in SEQ ID NO: 681, CDR-H2 as depicted in SEQ ID NO: 682, CDR-H3 as depicted in SEQ ID NO: 683, CDR-L1 as depicted in SEQ ID NO: 684, CDR-L2 as depicted in SEQ ID NO: 685 and CDR-L3 as depicted in SEQ ID NO: 686;
(35) CDR-H1 as depicted in SEQ ID NO: 691, CDR-H2 as depicted in SEQ ID NO: 692, CDR-H3 as depicted in SEQ ID NO: 693, CDR-L1 as depicted in SEQ ID NO: 694, CDR-L2 as depicted in SEQ ID NO: 695 and CDR-L3 as depicted in SEQ ID NO: 696;
(36) CDR-H1 as depicted in SEQ ID NO: 701, CDR-H2 as depicted in SEQ ID NO: 702, CDR-H3 as depicted in SEQ ID NO: 703, CDR-L1 as depicted in SEQ ID NO: 704, CDR-L2 as depicted in SEQ ID NO: 705 and CDR-L3 as depicted in SEQ ID NO: 706;
(37) CDR-H1 as depicted in SEQ ID NO: 711, CDR-H2 as depicted in SEQ ID NO: 712, CDR-H3 as depicted in SEQ ID NO: 713, CDR-L1 as depicted in SEQ ID NO: 714, CDR-L2 as depicted in SEQ ID NO: 715 and CDR-L3 as depicted in SEQ ID NO: 716;
(38) CDR-H1 as depicted in SEQ ID NO: 721, CDR-H2 as depicted in SEQ ID NO: 722, CDR-H3 as depicted in SEQ ID NO: 723, CDR-L1 as depicted in SEQ ID NO: 724, CDR-L2 as depicted in SEQ ID NO: 725 and CDR-L3 as depicted in SEQ ID NO: 726;
(39) CDR-H1 as depicted in SEQ ID NO: 731, CDR-H2 as depicted in SEQ ID NO: 732, CDR-H3 as depicted in SEQ ID NO: 733, CDR-L1 as depicted in SEQ ID NO: 734, CDR-L2 as depicted in SEQ ID NO: 735 and CDR-L3 as depicted in SEQ ID NO: 736;
(40) CDR-H1 as depicted in SEQ ID NO: 741, CDR-H2 as depicted in SEQ ID NO: 742, CDR-H3 as depicted in SEQ ID NO: 743, CDR-L1 as depicted in SEQ ID NO: 744, CDR-L2 as depicted in SEQ ID NO: 745 and CDR-L3 as depicted in SEQ ID NO: 746;
(41) CDR-H1 as depicted in SEQ ID NO: 751, CDR-H2 as depicted in SEQ ID NO: 752, CDR-H3 as depicted in SEQ ID NO: 753, CDR-L1 as depicted in SEQ ID NO: 754, CDR-L2 as depicted in SEQ ID NO: 755 and CDR-L3 as depicted in SEQ ID NO: 756;
(42) CDR-H1 as depicted in SEQ ID NO: 761, CDR-H2 as depicted in SEQ ID NO: 762, CDR-H3 as depicted in SEQ ID NO: 763, CDR-L1 as depicted in SEQ ID NO: 764, CDR-L2 as depicted in SEQ ID NO: 765 and CDR-L3 as depicted in SEQ ID NO: 766;
(43) CDR-H1 as depicted in SEQ ID NO: 771, CDR-H2 as depicted in SEQ ID NO: 772, CDR-H3 as depicted in SEQ ID NO: 773, CDR-L1 as depicted in SEQ ID NO: 774, CDR-L2 as depicted in SEQ ID NO: 775 and CDR-L3 as depicted in SEQ ID NO: 776;
(44) CDR-H1 as depicted in SEQ ID NO: 781, CDR-H2 as depicted in SEQ ID NO: 782, CDR-H3 as depicted in SEQ ID NO: 783, CDR-L1 as depicted in SEQ ID NO: 784, CDR-L2 as depicted in SEQ ID NO: 785 and CDR-L3 as depicted in SEQ ID NO: 786;
(45) CDR-H1 as depicted in SEQ ID NO: 791, CDR-H2 as depicted in SEQ ID NO: 792, CDR-H3 as depicted in SEQ ID NO: 793, CDR-L1 as depicted in SEQ ID NO: 794, CDR-L2 as depicted in SEQ ID NO: 795 and CDR-L3 as depicted in SEQ ID NO: 796;
(46) CDR-H1 as depicted in SEQ ID NO: 801, CDR-H2 as depicted in SEQ ID NO: 802, CDR-H3 as depicted in SEQ ID NO: 803, CDR-L1 as depicted in SEQ ID NO: 804, CDR-L2 as depicted in SEQ ID NO: 805 and CDR-L3 as depicted in SEQ ID NO: 806;
(47) CDR-H1 as depicted in SEQ ID NO: 811, CDR-H2 as depicted in SEQ ID NO: 812, CDR-H3 as depicted in SEQ ID NO: 813, CDR-L1 as depicted in SEQ ID NO: 814, CDR-L2 as depicted in SEQ ID NO: 815 and CDR-L3 as depicted in SEQ ID NO: 816;
(48) CDR-H1 as depicted in SEQ ID NO: 821, CDR-H2 as depicted in SEQ ID NO: 822, CDR-H3 as depicted in SEQ ID NO: 823, CDR-L1 as depicted in SEQ ID NO: 824, CDR-L2 as depicted in SEQ ID NO: 825 and CDR-L3 as depicted in SEQ ID NO: 826;
(49) CDR-H1 as depicted in SEQ ID NO: 831, CDR-H2 as depicted in SEQ ID NO: 832, CDR-H3 as depicted in SEQ ID NO: 833, CDR-L1 as depicted in SEQ ID NO: 834, CDR-L2 as depicted in SEQ ID NO: 835 and CDR-L3 as depicted in SEQ ID NO: 836;
(50) CDR-H1 as depicted in SEQ ID NO: 961, CDR-H2 as depicted in SEQ ID NO: 962, CDR-H3 as depicted in SEQ ID NO: 963, CDR-L1 as depicted in SEQ ID NO: 964, CDR-L2 as depicted in SEQ ID NO: 965 and CDR-L3 as depicted in SEQ ID NO: 966;
(51) CDR-H1 as depicted in SEQ ID NO: 971, CDR-H2 as depicted in SEQ ID NO: 972, CDR-H3 as depicted in SEQ ID NO: 973, CDR-L1 as depicted in SEQ ID NO: 974, CDR-L2 as depicted in SEQ ID NO: 975 and CDR-L3 as depicted in SEQ ID NO: 976;
(52) CDR-H1 as depicted in SEQ ID NO: 981, CDR-H2 as depicted in SEQ ID NO: 982, CDR-H3 as depicted in SEQ ID NO: 983, CDR-L1 as depicted in SEQ ID NO: 984, CDR-L2 as depicted in SEQ ID NO: 985 and CDR-L3 as depicted in SEQ ID NO: 986; and
(53) CDR-H1 as depicted in SEQ ID NO: 991, CDR-H2 as depicted in SEQ ID NO: 992, CDR-H3 as depicted in SEQ ID NO: 993, CDR-L1 as depicted in SEQ ID NO: 994, CDR-L2 as depicted in SEQ ID NO: 995 and CDR-L3 as depicted in SEQ ID NO: 996.

8. The binding molecule according to claim 1, wherein the first binding domain comprises a VH region selected from the group consisting of VH regions as depicted in SEQ ID NO: 7, SEQ ID NO: 17, SEQ ID NO: 27, SEQ ID NO: 37, SEQ ID NO: 47, SEQ ID NO: 57, SEQ ID NO: 67, SEQ ID NO: 77, SEQ ID NO: 167, SEQ ID NO: 177, SEQ ID NO: 187, SEQ ID NO: 197, SEQ ID NO: 207, SEQ ID NO: 217, SEQ ID NO: 227, SEQ ID NO: 317, SEQ ID NO: 327, SEQ ID NO: 337, SEQ ID NO: 347, SEQ ID NO: 357, SEQ ID NO: 367, SEQ ID NO: 377, SEQ ID NO: 387, SEQ ID NO: 587, SEQ ID NO: 597, SEQ ID NO: 607, SEQ ID NO: 617, SEQ ID NO: 627, SEQ ID NO: 637, SEQ ID NO: 647, SEQ ID NO: 657, SEQ ID NO: 667, SEQ ID NO: 677, SEQ ID NO: 687, SEQ ID NO: 697, SEQ ID NO: 707, SEQ ID NO: 717, SEQ ID NO: 727, SEQ ID NO: 737, SEQ ID NO: 747, SEQ ID NO: 757, SEQ ID NO: 767, SEQ ID NO: 777, SEQ ID NO: 787, SEQ ID NO: 797, SEQ ID NO: 807, SEQ ID NO: 817, SEQ ID NO: 827, SEQ ID NO: 837, SEQ ID NO: 967, SEQ ID NO: 977, SEQ ID NO: 987, and SEQ ID NO: 997.

9. The binding molecule according to claim 1, wherein the first binding domain comprises a VL region selected from the group consisting of VL regions as depicted in SEQ ID NO: 8, SEQ ID NO: 18, SEQ ID NO: 28, SEQ ID NO: 38, SEQ ID NO: 48, SEQ ID NO: 58, SEQ ID NO: 68, SEQ ID NO: 78, SEQ ID NO: 168, SEQ ID NO: 178, SEQ ID NO: 188, SEQ ID NO: 198, SEQ ID NO: 208, SEQ ID NO: 218, SEQ ID NO: 228, SEQ ID NO: 318, SEQ ID NO: 328, SEQ ID NO: 338, SEQ ID NO: 348, SEQ ID NO: 358, SEQ ID NO: 368, SEQ ID NO: 378, SEQ ID NO: 388, SEQ ID NO: 588, SEQ ID NO: 598, SEQ ID NO: 608, SEQ ID NO: 618, SEQ ID NO: 628, SEQ ID NO: 638, SEQ ID NO: 648, SEQ ID NO: 658, SEQ ID NO: 668, SEQ ID NO: 678, SEQ ID NO: 688, SEQ ID NO: 698, SEQ ID NO: 708, SEQ ID NO: 718, SEQ ID NO: 728, SEQ ID NO: 738, SEQ ID NO: 748, SEQ ID NO: 758, SEQ ID NO: 768, SEQ ID NO: 778, SEQ ID NO: 788, SEQ ID NO: 798, SEQ ID NO: 808, SEQ ID NO: 818, SEQ ID NO: 828, SEQ ID NO: 838, SEQ ID NO: 968, SEQ ID NO: 978, SEQ ID NO: 988, and SEQ ID NO: 998.

10. The binding molecule according to claim 1, wherein the first binding domain comprises a VH region and a VL region selected from the group consisting of:
(1) a VH region as depicted in SEQ ID NO: 7, and a VL region as depicted in SEQ ID NO: 8;
(2) a VH region as depicted in SEQ ID NO: 17, and a VL region as depicted in SEQ ID NO: 18;
(3) a VH region as depicted in SEQ ID NO: 27, and a VL region as depicted in SEQ ID NO: 28;
(4) a VH region as depicted in SEQ ID NO: 37, and a VL region as depicted in SEQ ID NO: 38;
(5) a VH region as depicted in SEQ ID NO: 47, and a VL region as depicted in SEQ ID NO: 48;
(6) a VH region as depicted in SEQ ID NO: 57, and a VL region as depicted in SEQ ID NO: 58;
(7) a VH region as depicted in SEQ ID NO: 67, and a VL region as depicted in SEQ ID NO: 68;
(8) a VH region as depicted in SEQ ID NO: 77, and a VL region as depicted in SEQ ID NO: 78;
(9) a VH region as depicted in SEQ ID NO: 167, and a VL region as depicted in SEQ ID NO: 168;
(10) a VH region as depicted in SEQ ID NO: 177, and a VL region as depicted in SEQ ID NO: 178;
(11) a VH region as depicted in SEQ ID NO: 187, and a VL region as depicted in SEQ ID NO: 188;
(12) a VH region as depicted in SEQ ID NO: 197, and a VL region as depicted in SEQ ID NO: 198;
(13) a VH region as depicted in SEQ ID NO: 207, and a VL region as depicted in SEQ ID NO: 208;
(14) a VH region as depicted in SEQ ID NO: 217, and a VL region as depicted in SEQ ID NO: 218;
(15) a VH region as depicted in SEQ ID NO: 227, and a VL region as depicted in SEQ ID NO: 228;
(16) a VH region as depicted in SEQ ID NO: 317, and a VL region as depicted in SEQ ID NO: 318;
(17) a VH region as depicted in SEQ ID NO: 327, and a VL region as depicted in SEQ ID NO: 328;
(18) a VH region as depicted in SEQ ID NO: 337, and a VL region as depicted in SEQ ID NO: 338;
(19) a VH region as depicted in SEQ ID NO: 347, and a VL region as depicted in SEQ ID NO: 348;
(20) a VH region as depicted in SEQ ID NO: 357, and a VL region as depicted in SEQ ID NO: 358;
(21) a VH region as depicted in SEQ ID NO: 367, and a VL region as depicted in SEQ ID NO: 368;
(22) a VH region as depicted in SEQ ID NO: 377, and a VL region as depicted in SEQ ID NO: 378;
(23) a VH region as depicted in SEQ ID NO: 387, and a VL region as depicted in SEQ ID NO: 388;
(24) a VH region as depicted in SEQ ID NO: 587, and a VL region as depicted in SEQ ID NO: 588;
(25) a VH region as depicted in SEQ ID NO: 597, and a VL region as depicted in SEQ ID NO: 598;
(26) a VH region as depicted in SEQ ID NO: 607, and a VL region as depicted in SEQ ID NO: 608;
(27) a VH region as depicted in SEQ ID NO: 617, and a VL region as depicted in SEQ ID NO: 618;
(28) a VH region as depicted in SEQ ID NO: 627, and a VL region as depicted in SEQ ID NO: 628;
(29) a VH region as depicted in SEQ ID NO: 637, and a VL region as depicted in SEQ ID NO: 638;
(30) a VH region as depicted in SEQ ID NO: 647, and a VL region as depicted in SEQ ID NO: 648;
(31) a VH region as depicted in SEQ ID NO: 657, and a VL region as depicted in SEQ ID NO: 658;
(32) a VH region as depicted in SEQ ID NO: 667, and a VL region as depicted in SEQ ID NO: 668;
(33) a VH region as depicted in SEQ ID NO: 677, and a VL region as depicted in SEQ ID NO: 678;
(34) a VH region as depicted in SEQ ID NO: 687, and a VL region as depicted in SEQ ID NO: 688;
(35) a VH region as depicted in SEQ ID NO: 697, and a VL region as depicted in SEQ ID NO: 698;
(36) a VH region as depicted in SEQ ID NO: 707, and a VL region as depicted in SEQ ID NO: 708;
(37) a VH region as depicted in SEQ ID NO: 717, and a VL region as depicted in SEQ ID NO: 718;
(38) a VH region as depicted in SEQ ID NO: 727, and a VL region as depicted in SEQ ID NO: 728;
(39) a VH region as depicted in SEQ ID NO: 737, and a VL region as depicted in SEQ ID NO: 738;
(40) a VH region as depicted in SEQ ID NO: 747, and a VL region as depicted in SEQ ID NO: 748;
(41) a VH region as depicted in SEQ ID NO: 757, and a VL region as depicted in SEQ ID NO: 758;
(42) a VH region as depicted in SEQ ID NO: 767, and a VL region as depicted in SEQ ID NO: 768;
(43) a VH region as depicted in SEQ ID NO: 777, and a VL region as depicted in SEQ ID NO: 778;
(44) a VH region as depicted in SEQ ID NO: 787, and a VL region as depicted in SEQ ID NO: 788;
(45) a VH region as depicted in SEQ ID NO: 797, and a VL region as depicted in SEQ ID NO: 798;
(46) a VH region as depicted in SEQ ID NO: 807, and a VL region as depicted in SEQ ID NO: 808;
(47) a VH region as depicted in SEQ ID NO: 817, and a VL region as depicted in SEQ ID NO: 818;
(48) a VH region as depicted in SEQ ID NO: 827, and a VL region as depicted in SEQ ID NO: 828;
(49) a VH region as depicted in SEQ ID NO: 837, and a VL region as depicted in SEQ ID NO: 838;
(50) a VH region as depicted in SEQ ID NO: 967, and a VL region as depicted in SEQ ID NO: 968;
(51) a VH region as depicted in SEQ ID NO: 977, and a VL region as depicted in SEQ ID NO: 978;
(52) a VH region as depicted in SEQ ID NO: 987, and a VL region as depicted in SEQ ID NO: 988; and
(53) a VH region as depicted in SEQ ID NO: 997, and a VL region as depicted in SEQ ID NO: 998.

11. The binding molecule according to claim 10, wherein the first binding domain comprises an amino acid sequence selected from the group consisting of SEQ ID NO: 9, SEQ ID NO: 19, SEQ ID NO: 29, SEQ ID NO: 39, SEQ ID NO: 49, SEQ ID NO: 59, SEQ ID NO: 69, SEQ ID NO: 79, SEQ ID NO: 169, SEQ ID NO: 179, SEQ ID NO: 189, SEQ ID NO: 199, SEQ ID NO: 209, SEQ ID NO: 219, SEQ ID NO: 229, SEQ ID NO: 319, SEQ ID NO: 329, SEQ ID NO: 339, SEQ ID NO: 349, SEQ ID NO: 359, SEQ ID NO: 369, SEQ ID NO: 379, SEQ ID NO: 389, SEQ ID NO: 589, SEQ ID NO: 599, SEQ ID NO: 609, SEQ ID NO: 619, SEQ ID NO: 629, SEQ ID NO: 639, SEQ ID NO: 649, SEQ ID NO: 659, SEQ ID NO: 669, SEQ ID NO: 679, SEQ ID NO: 689, SEQ ID NO: 699, SEQ ID NO: 709, SEQ ID NO: 719, SEQ ID NO: 729, SEQ ID NO: 739, SEQ ID NO: 749, SEQ ID NO: 759, SEQ ID NO: 769, SEQ ID NO: 779, SEQ ID NO: 789, SEQ ID NO: 799, SEQ ID NO: 809, SEQ ID NO: 819, SEQ ID NO: 829, SEQ ID NO: 839, SEQ ID NO: 969, SEQ ID NO: 979, SEQ ID NO: 989, and SEQ ID NO: 999.

12. The binding molecule according to claim 1 having the amino acid sequence shown in SEQ ID NO:340 or SEQ ID NO: 980.

13. The binding molecule according to claim 1, characterized by an EC50 (pg/ml) of 350 or less, preferably 320 or less.

14. The binding molecule according to claim 1, characterized by an EC50 (pg/ml) which equates to the EC50 (pg/ml) of any one of BC E5 33-B11-B8, BC 5G9 92-E10, BC 5G9 91-D2-B10, BC B12 33-A4-B2, BC 3A4 37-A11-G1, BC A7-27 C4-G7, BC C3 33-D7-B1, BC C3 33-F8-E6 B1.

15. A nucleic acid sequence encoding a binding molecule of claim 1 or a vector comprising a nucleic acid sequence encoding a binding molecule of claim 1.

16. A host cell transformed or transfected with the nucleic acid sequence or with the vector as defined in claim 15.

17. A process for the production of a binding molecule according to claim 1, said process comprising
(a) culturing the host cell as defined in claim 16 under conditions allowing the expression of the binding molecule and recovering the binding molecule from the culture; or
(b) using epitope cluster 3 of BCMA for the generation of a binding molecule, preferably an antibody, which is capable of binding to BCMA, wherein epitope cluster 3 of BCMA corresponds to amino acid residues 24 to 41 of the sequence as depicted in SEQ ID NO: 1002; or
(c) generating the binding molecule which is an antibody, preferably a bispecific binding molecule, which is capable of binding to BCMA, comprising (c1) immunizing an animal with a polypeptide comprising epitope cluster 3 of BCMA, wherein epitope cluster 3 of BCMA corresponds to amino acid residues 24 to 41 of the sequence as depicted in SEQ ID NO: 1002, (c2) obtaining said antibody, and optionally (c3) converting said antibody into a bispecific binding molecule which is capable of binding to human BCMA and preferably to the T cell CD3 receptor complex.

18. A pharmaceutical composition comprising a binding molecule according to claim 1, or a binding molecule produced according to the process of claim 17.

19. A method for the treatment or amelioration of a disease selected from the group consisting of plasma cell disorders and B cell disorders that correlate with BCMA expression and autoimmune diseases, comprising a step of administering to a subject in need thereof the binding molecule according to claim 1, or produced according to the process of claim 17.

20. The method according to claim 19, wherein the plasma cell disorder is selected from the group consisting of multiple myeloma, plasmacytoma, plasma cell leukemia, macro-globulinemia, amyloidosis, Waldenstrom's macroglobulinemia, solitary bone plasma-cytoma, extramedullary plasmacytoma, osteosclerotic myeloma, heavy chain diseases, monoclonal gammopathy of undetermined significance, and smoldering multiple myeloma.

21. The method according to claim 19, wherein the autoimmune disease is systemic lupus erythematodes.

22. A kit comprising a binding molecule as defined in claim 1, a nucleic acid molecule or vector as defined in claim 15, and/or a host cell as defined in claim 16.
